(19) United States
(12) Patent Application Publication
(10) Pub. No.: US 2023/0265406 A1
(43) Pub. Date: Aug. 24, 2023

(54) RECOMBINANT SIALIDASES WITH REDUCED PROTEASE SENSITIVITY, SIALIDASE FUSION PROTEINS, AND METHODS OF USING THE SAME

(71) Applicant: Palleon Pharmaceuticals Inc., Waltham, MA (US)

(72) Inventors: Li Peng, Lexington, MA (US); Sandip A. Shelke, Belmont, MA (US); Lizhi Cao, Stoneham, MA (US)

(21) Appl. No.: 18/003,234

(22) PCT Filed: Jul. 2, 2021
(86) PCT No.: PCT/US2021/040240

§ 371 Date: Dec. 23, 2022

Related U.S. Application Data
(60) Provisional application No. 63/134,411, filed on Jan. 6, 2021.
(60) Provisional application No. 63/047,989, filed on Jul. 3, 2020.

(51) Int. Cl. C12N 9/24; C07K 16/32; C07K 16/28; C07K 16/40; A61P 35/00

(52) U.S. Cl. CPC C12N 9/2402; C12Y 302/01018; C07K 16/32; C07K 16/2896; C07K 16/40; C07K 16/2887; C07K 16/2827; A61P 35/00; C07K 2319/30

(57) ABSTRACT

The invention relates generally to recombinant sialidases (for example, recombinant sialidases having reduced protease sensitivity), recombinant fusion proteins, and antibody conjugates, and their use in the treatment of cancer.

### CROSS REFERENCE TO RELATED APPLICATIONS

[0001] This application claims the benefit of, and priority to, U.S. Provisional Patent Application Ser. No. 63/047,989, filed Jul. 3, 2020, and U.S. Provisional Patent Application Ser. No. 63/134,411, filed Jan. 6, 2021, the entire disclosure of each of which is hereby incorporated by reference in its entirety.

### FIELD OF THE INVENTION

[0002] The invention relates generally to recombinant sialidases (for example, recombinant sialidases having reduced protease sensitivity) and recombinant fusion proteins, and their use in the treatment of cancer.

### BACKGROUND

[0003] A growing body of evidence supports roles for glycans, and in particular, sialoglycans, at various pathophysiological steps of tumor progression. Glycans regulate tumor proliferation, invasion, hematogenous metastasis and angiogenesis (Fuster et al. (2005) NAT. REV. CANCER 5(7): 526-42). The sialylation of cell surface glycoconjugates is frequently altered in cancers, resulting in the expression of sialylated tumor-associated carbohydrate antigens. The expression of sialylated glycans by tumor cells is often associated with increased aggressiveness and metastatic potential of a tumor (Julien S., Delannoy P. (2015) Sialic Acid and Cancer. In: Taniguchi N., Endo T., Hart G., Seeberger P., Wong CH. (eds) GLYCOSCIENCE: BIOLOGY AND MEDICINE, Springer, Tokyo. https://doi.org/10.1007/978-4-431-54841-6_193).

[0004] It has recently become apparent that Siglecs (sialic acid-binding immunoglobulin-like lectins), a family of sialic acid binding lectins, play a role in cancer immune suppression by binding to hypersialylated cancer cells and mediating the suppression of signals from activating NK cell receptors, thereby inhibiting NK cell-mediated killing of tumor cells (Jandus et al. (2014) J. CLIN. INVEST. 124: 1810-1820; Läubli et al. (2014) PROC. NATL. ACAD. SCI. USA 111: 14211-14216; Hudak et al. (2014) NAT. CHEM. BIOL. 10: 69-75). Likewise, enzymatic removal of sialic acids by treatment with sialidase can enhance NK cell-mediated killing of tumor cells (Jandus, supra; Hudak, supra; Xiao et al. (2016) PROC. NATL. ACAD. SCI. USA 113(37): 10304-9).

[0005] Cancer immunotherapy with immune checkpoint inhibitors, including antibodies blocking the PD-1/PD-L1 pathway, has improved the outcome of many cancer patients. However, despite advances that have been made to date, many patients do not respond to currently available immune checkpoint inhibitors. Accordingly, there is still a need for effective interventions that overcome the immune suppressive tumor microenvironment and for treating cancers associated with hypersialylated cancer cells.

### SUMMARY OF THE INVENTION

[0006] The invention is based, in part, upon the discovery that it is possible to produce recombinant mutant forms of sialidase enzymes, including, for example, sialidase enzymes that are less sensitive to protease degradation than a corresponding sialidase enzyme without the mutation or mutations that render the sialidase less sensitive to protease degradation. The sialidase enzymes can be used in fusion proteins and/or antibody conjugates containing such sialidase enzymes that have suitable substrate specificities and activities to be useful in removing sialic acid and/or sialic acid containing molecules from the surface of cells of interest (e.g., cancer cells) and/or removing sialic acid and/or sialic acid containing molecules from the tumor microenvironment, and/or reducing the concentration of sialic acid and/or sialic acid containing molecules in the tumor microenvironment.

[0007] Accordingly, in one aspect, the invention relates to a recombinant mutant sialidase enzyme, e.g., a human mutant sialidase enzyme, wherein the sialidase comprises a mutation that increases resistance (decreases sensitivity) to cleavage by a protease. In certain embodiments, incubation of the recombinant mutant sialidase (e.g., human sialidase) with the protease results in less than 50% (e.g., less than 40%, less than 30%, less than 10%, less than 5%, less than 3%, less than 1%, or less than 0.5%) of the proteolytic cleavage of a corresponding wild-type sialidase (or modified wild-type sialidase lacking the mutations described herein) when incubated with the protease under the same conditions. In certain embodiments, the protease is trypsin.

[0008] In certain embodiments, the sialidase is a human sialidase that comprises a substitution of an alanine residue at a position corresponding to position 213 of wild-type human Neu2 (A213); a substitution of a leucine residue at a position corresponding to position 240 of wild-type human Neu2 (L240); a substitution of an arginine residue at a position corresponding to position 241 of wild-type human Neu2 (R241); a substitution of an alanine residue at a position corresponding to position 242 of wild-type human Neu2 (A242); a substitution of an arginine residue at a position corresponding to position 243 of wild-type human Neu2 (R243); a substitution of a valine residue at a position corresponding to position 244 of wild-type human Neu2 (V244); a substitution of a serine residue at a position corresponding to position 258 of wild-type human Neu2 (S258); a substitution of a leucine residue at a position corresponding to position 260 of wild-type human Neu2 (L260); a substitution of a valine residue at a position corresponding to position 265 of wild-type human Neu2 (V265); or a combination of any of the foregoing substitutions.

[0009] In certain embodiments, in the sialidase, the alanine residue at a position corresponding to position 213 of wild-type human Neu2 is substituted by cysteine (A213C), asparagine (A213N), serine (A213S), or threonine (A213T); the leucine residue at a position corresponding to position 240 of wild-type human Neu2 (L240) is substituted by aspartic acid (L240D), asparagine (L240N), or tyrosine (L240Y); the arginine residue at a position corresponding to position 241 of wild-type human Neu2 (R241) is substituted by alanine (R241A), aspartic acid (R241D), leucine (R241L), glutamine (R241Q). or tyrosine (R241Y); the alanine residue at a position corresponding to position 242 of wild-type human Neu2 (A242) is substituted by cysteine (A242C), phenylalanine (A242F), glycine (A242G), histidine (A242H), isoleucine (A242I), lysine (A242K), leucine (A242L), methionine (A242M), asparagine (A242N), glutamine (A242Q), arginine (A242R), serine (A242S), valine (A242V), tryptophan (A242W), or tyrosine (A242Y); the arginine residue at a position corresponding to position 243 of wild-type human Neu2 (R243) is substituted by glutamic acid (R243E), histidine (R243H), asparagine (R243N), glutamine (A243Q), or lysine (A243K); the valine residue at a position corresponding to position 244 of wild-type human Neu2 (V244) is substituted by isoleucine (V244I), lysine (V244K), or proline (V244P); the serine residue at a position corresponding to position 258 of wild-type human Neu2 (S258) is substituted by cysteine (S258C); the leucine residue at a position corresponding to position 260 of wild-type human Neu2 (L260) is substituted by aspartic acid (L260D), phenylalanine (L260F), glutamine (L260Q), or threonine (L260T); the valine residue at a position corresponding to position 265 of wild-type human Neu2 (V265) is substituted by phenylalanine (V265F); or the sialidase comprises a combination of any of the foregoing substitutions.

[0010] In certain embodiments, the sialidase comprises a combination of substitutions as set forth in TABLE 2, hereinbelow.

[0011] In another aspect, the invention provides a recombinant mutant human sialidase enzyme, wherein the sialidase comprises: (a) a substitution of a proline residue at a position corresponding to position 5 of wild-type human Neu2 (P5); (b) a substitution of a lysine residue at a position corresponding to position 9 of wild-type human Neu2 (K9); (c) a substitution of an alanine residue at a position corresponding to position 42 of wild-type human Neu2 (A42); (d) a substitution of a lysine residue at a position corresponding to position 44 of wild-type human Neu2 (K44); (e) a substitution of a lysine residue at a position corresponding to position 45 of wild-type human Neu2 (K45); (f) a substitution of a leucine residue at a position corresponding to position 54 of wild-type human Neu2 (L54); (g) a substitution of a proline residue at a position corresponding to position 62 of wild-type human Neu2 (P62); (h) a substitution of a glutamine residue at a position corresponding to position 69 of wild-type human Neu2 (Q69); (i) a substitution of an arginine residue at a position corresponding to position 78 of wild-type human Neu2 (R78); (j) a substitution of an aspartic acid residue at a position corresponding to position 80 of wild-type human Neu2 (D80); (k) a substitution of an alanine residue at a position corresponding to position 93 of wild-type human Neu2 (A93); (l) a substitution of a glycine residue at a position corresponding to position 107 of wild-type human Neu2 (G107); (m) a substitution of a glutamine residue at a position corresponding to position 108 of wild-type human Neu2 (Q108); (n) a substitution of a glutamine residue at a position corresponding to position 112 of wild-type human Neu2 (Q112); (o) a substitution of a cysteine residue at a position corresponding to position 125 of wild-type human Neu2 (C125); (p) a substitution of a glutamine residue at a position corresponding to position 126 of wild-type human Neu2 (Q126); (q) a substitution of an alanine residue at a position corresponding to position 150 of wild-type human Neu2 (A150); (r) a substitution of a cysteine residue at a position corresponding to position 164 of wild-type human Neu2 (C164); (s) a substitution of an arginine residue at a position corresponding to position 170 of wild-type human Neu2 (R170); (t) a substitution of an alanine residue at a position corresponding to position 171 of wild-type human Neu2 (A171); (u) a substitution of a glutamine residue at a position corresponding to position 188 of wild-type human Neu2 (Q188); (v) a substitution of an arginine residue at a position corresponding to position 189 of wild-type human Neu2 (R189); (w) a substitution of an alanine residue at a position corresponding to position 213 of wild-type human Neu2 (A213); (x) a substitution of a leucine residue at a position corresponding to position 217 of wild-type human Neu2 (L217); (y) a substitution of a glutamic acid residue at a position corresponding to position 225 of wild-type human Neu2 (E225); (z) a substitution of a histidine residue at a position corresponding to position 239 of wild-type human Neu2 (H239); (aa) a substitution of a leucine residue at a position corresponding to position 240 of wild-type human Neu2 (L240); (bb) a substitution of an arginine residue at a position corresponding to position 241 of wild-type human Neu2 (R241); (cc) a substitution of an alanine residue at a position corresponding to position 242 of wild-type human Neu2 (A242); (dd) a substitution of a valine residue at a position corresponding to position 244 of wild-type human Neu2 (V244); (ee) a substitution of a threonine residue at a position corresponding to position 249 of wild-type human Neu2 (T249); (ff) a substitution of an aspartic acid residue at a position corresponding to position 251 of wild-type human Neu2 (D251); (gg) a substitution of a glutamic acid residue at a position corresponding to position 257 of wild-type human Neu2 (E257); (hh) a substitution of a serine residue at a position corresponding to position 258 of wild-type human Neu2 (S258); (ii) a substitution of a leucine residue at a position corresponding to position 260 of wild-type human Neu2 (L260); (jj) a substitution of a valine residue at a position corresponding to position 265 of wild-type human Neu2 (V265); (kk) a substitution of a glutamine residue at a position corresponding to position 270 of wild-type human Neu2 (Q270); (ll) a substitution of a tryptophan residue at a position corresponding to position 292 of wild-type human Neu2 (W292); (mm) a substitution of a serine residue at a position corresponding to position 301 of wild-type human Neu2 (S301); (nn) a substitution of a tryptophan residue at a position corresponding to position 302 of wild-type human Neu2 (W302); (oo) a substitution of a valine residue at a position corresponding to position 363 of wild-type human Neu2 (V363); or (pp) a substitution of a leucine residue at a position corresponding to position 365 of wild-type human Neu2 (L365); or a combination of any of the foregoing substitutions. For example, the sialidase may comprise a substitution of K9, A42, P62, A93, Q216, A242, Q270, S301, W302, V363, or L365, or a combination of any of the foregoing substitutions.

[0012] In certain embodiments, in the sialidase: (a) the proline residue at a position corresponding to position 5 of wild-type human Neu2 is substituted by histidine (P5H); (b) the lysine residue at a position corresponding to position 9 of wild-type human Neu2 is substituted by aspartic acid (K9D); (c) the alanine residue at a position corresponding to position 42 of wild-type human Neu2 is substituted by arginine (A42R) or aspartic acid (A42D); (d) the lysine residue at a position corresponding to position 44 of wild-type human Neu2 is substituted by arginine (K44R) or glutamic acid (K44E); (e) the lysine residue at a position corresponding to position 45 of wild-type human Neu2 is substituted by alanine (K45A), arginine (K45R), or glutamic acid (K45E); (f) the leucine residue at a position corresponding to position 54 of wild-type human Neu2 is substituted by methionine (L54M); (g) the proline residue at a position corresponding to position 62 of wild-type human Neu2 is substituted by asparagine (P62N), aspartic acid (P62D), histidine (P62H), glutamic acid (P62E), glycine (P62G), serine (P62S), or threonine (P62T); (h) the glutamine residue at a position corresponding to position 69 of wild-type human Neu2 is substituted by histidine (Q69H); (i) the arginine residue at a position corresponding to position 78 of wild-type human Neu2 is substituted by lysine (R78K); (j) the aspartic acid residue at a position corresponding to position 80 of wild-type human Neu2 is substituted by proline (D80P); (k) the alanine residue at a position corresponding to position 93 of wild-type human Neu2 is substituted by glutamic acid (A93E) or lysine (A93K); (l) the glycine residue at a position corresponding to position 107 of wild-type human Neu2 is substituted by aspartic acid (G107D); (m) the glutamine residue at a position corresponding to position 108 of wild-type human Neu2 is substituted by histidine (Q108H); (n) the glutamine residue at a position corresponding to position 112 of wild-type human Neu2 is substituted by arginine (Q112R) or lysine (Q112K); (o) the cysteine residue at a position corresponding to position 125 of wild-type human Neu2 is substituted by leucine (C125L); (p) the glutamine residue at a position corresponding to position 126 of wild-type human Neu2 is substituted by leucine (Q126L), glutamic acid (Q126E), phenylalanine (Q126F), histidine (Q126H), isoleucine (Q126I), or tyrosine (Q126Y); (q) the alanine residue at a position corresponding to position 150 of wild-type human Neu2 is substituted by valine (A150V); (r) the cysteine residue at a position corresponding to position 164 of wild-type human Neu2 is substituted by glycine (C164G); (s) the arginine residue at a position corresponding to position 170 of wild-type human Neu2 is substituted by proline (R170P); (t) the alanine residue at a position corresponding to position 171 of wild-type human Neu2 is substituted by glycine (A171G); (u) the glutamine residue at a position corresponding to position 188 of wild-type human Neu2 is substituted by proline (Q188P); (v) the arginine residue at a position corresponding to position 189 of wild-type human Neu2 is substituted by proline (R189P); (w) the alanine residue at a position corresponding to position 213 of wild-type human Neu2 is substituted by cysteine (A213C), asparagine (A213N), serine (A213S), or threonine (A213T); (x) the leucine residue at a position corresponding to position 217 of wild-type human Neu2 is substituted by alanine (L217A) or valine (L217V); (y) the threonine residue at a position corresponding to position 249 of wild-type human Neu2 is substituted by alanine (T249A); (z) the aspartic acid residue at a position corresponding to position 251 of wild-type human Neu2 is substituted by glycine (D251G); (aa) the glutamic acid residue at a position corresponding to position 225 of wild-type human Neu2 is substituted by proline (E225P); (bb) the histidine residue at a position corresponding to position 239 of wild-type human Neu2 is substituted by proline (H239P); (cc) the leucine residue at a position corresponding to position 240 of wild-type human Neu2 is substituted by aspartic acid (L240D), asparagine (L240N), or tyrosine (L240Y); (dd) the arginine residue at a position corresponding to position 241 of wild-type human Neu2 is substituted by alanine (R241A), aspartic acid (R241D), leucine (R241L), glutamine (R241Q). or tyrosine (R241Y); (ee) the alanine residue at a position corresponding to position 242 of wild-type human Neu2 is substituted by cysteine (A242C), phenylalanine (A242F), glycine (A242G), histidine (A242H), isoleucine (A242I), lysine (A242K), leucine (A242L), methionine (A242M), asparagine (A242N), glutamine (A242Q), arginine (A242R), serine (A242S), valine (A242V), tryptophan (A242W), or tyrosine (A242Y); (ff) the valine residue at a position corresponding to position 244 of wild-type human Neu2 is substituted by isoleucine (V244I), lysine (V244K), or proline (V244P); (gg) the glutamic acid residue at a position corresponding to position 257 of wild-type human Neu2 is substituted by proline (E257P); (hh) the serine residue at a position corresponding to position 258 is substituted by cysteine (S258C); (ii) the leucine residue at a position corresponding to position 260 of wild-type human Neu2 is substituted by aspartic acid (L260D), phenylalanine (L260F), glutamine (L260Q), or threonine (L260T); (jj) the valine residue at a position corresponding to position 265 of wild-type human Neu2 is substituted by phenylalanine (V265F); (kk) the glutamine residue at a position corresponding to position 270 of wild-type human Neu2 is substituted by alanine (Q270A), histidine (Q270H), phenylalanine (Q270F), proline (Q270P), serine (Q270S), or threonine (Q270T); (ll) the tryptophan residue at a position corresponding to position 292 of wild-type human Neu2 is substituted by arginine (W292R); (mm) the serine residue at a position corresponding to position 301 of wild-type human Neu2 is substituted by alanine (S301A), aspartic acid (S301D), glutamic acid (S301E), phenylalanine (S301F), histidine (S301H), lysine (S301K), leucine (S301L), methionine (S301M), asparagine (S301N), proline (S301P), glutamine (S301Q), arginine (S301R), threonine (S301T), valine (S301V), tryptophan (S301W), or tyrosine (S301Y)); (nn) the tryptophan residue at a position corresponding to position 302 of wild-type human Neu2 is substituted by alanine (W302A), aspartic acid (W302D), phenylalanine (W302F), glycine (W302G), histidine (W302H), isoleucine (W302I), lysine (W302K), leucine (W302L), methionine (W302M), asparagine (W302N), proline (W302P), glutamine (W302Q), arginine (W302R), serine (W302S), threonine (W302T), valine (W302V), or tyrosine (W302Y); (oo) the valine residue at a position corresponding to position 363 of wild-type human Neu2 is substituted by arginine (V363R); or (pp) the leucine residue at a position corresponding to position 365 of wild-type human Neu2 is substituted by glutamine (L365Q), histidine (L365H), isoleucine (L365I), lysine (L365K) or serine (L365S); or the sialidase comprises a combination of any of the foregoing substitutions. For example, the sialidase may comprise a substitution selected from K9D, A42R, P62G, P62N, P62S, P62T, A93E, Q126Y, A242F, A242W, A242Y, Q270A, Q270T, S301A, S301R, W302K, W302R, V363R, and L365I, or a combination of any of the foregoing substitutions.

[0013] In certain embodiments of any of the foregoing sialidases, the sialidase further comprises: (a) a substitution or deletion of a methionine residue at a position corresponding to position 1 of wild-type human Neu2 (M1); (b) a substitution of a valine residue at a position corresponding to position 6 of wild-type human Neu2 (V6); (c) a substitution of an isoleucine residue at a position corresponding to position 187 of wild-type human Neu2 (I187); or (d) a substitution of a cysteine residue at a position corresponding to position 332 of wild-type human Neu2 (C332); or a combination of any of the foregoing substitutions.

[0014] In certain embodiments, in the sialidase: (a) the methionine residue at a position corresponding to position 1 of wild-type human Neu2 is deleted (ΔM1), is substituted by alanine (M1A), or is substituted by aspartic acid (M1D); (b) the valine residue at a position corresponding to position 6 of wild-type human Neu2 is substituted by tyrosine (V6Y); (c) the isoleucine residue at a position corresponding to position 187 of wild-type human Neu2 is substituted by lysine (I187K); or (d) the cysteine residue at a position corresponding to position 332 of wild-type human Neu2 is substituted by alanine (C332A); or the sialidase comprises a combination of any of the foregoing substitutions.

[0015] In certain embodiments of any of the foregoing sialidases, the sialidase comprises: (a) the M1D, V6Y, P62G, A93E, I187K, and C332A substitutions; (b) the M1D, V6Y, K9D, A93E, I187K, C332A, V363R, and L365I substitutions; (c) the M1D, V6Y, P62N, I187K, and C332A substitutions; (d) the M1D, V6Y, I187K, Q270A, S301R, W302K, and C332A substitutions; (e) the M1D, V6Y, P62S, I187K, Q270A, S301R, W302K, and C332A substitutions; (f) the M1D, V6Y, P62T, I187K, Q270A, S301R, W302K, and C332A substitutions; (g) the M1D, V6Y, P62N, I187K, Q270A, S301R, W302K, and C332A substitutions; (h) the M1D, V6Y, P62G, A93E, I187K, S301A, W302R, and C332A substitutions; (i) the M1D, V6Y, P62G, A93E, Q126Y, I187K, Q270T, and C332A substitutions; (j) the M1D, V6Y, P62G, A93E, Q126Y, I187K, and C332A substitutions; (k) the M1D, V6Y, P62G, A93E, Q126Y, I187K, A242F, Q270T, and C332A substitutions; or (l) the M1D, V6Y, A42R, P62G, A93E, Q126Y, I187K, A242F, Q270T, and C332A substitutions.

[0016] In certain embodiments of any of the foregoing sialidases, the sialidase has a different substrate specificity than the corresponding wild-type sialidase. For example, in certain embodiments the sialidase can cleave α2,3, α2,6, and/or α2,8 linkages. In certain embodiments the sialidase can cleave α2,3 and α2,8 linkages.

[0017] In certain embodiments of any of the foregoing sialidases, the sialidase comprises any one of SEQ ID NOs: 48-54, 149, 154, 159, 191, or 198, or an amino acid sequence that has at least 85%, 90%, 95%, 96%, 97%, 98%, or 99% sequence identity to any one of SEQ ID NOs: 48-54, 149, 154, 159, 191, or 198.

[0018] In addition, the invention provides a recombinant mutant human sialidase comprising a mutation or combination of mutations set forth in any one of TABLES 1, 2, 7-9, 11-13, 15-30, 34, or 35, hereinbelow. In certain embodiments, the sialidase further comprises a mutation or combination of mutations set forth in any one of TABLES 3-6, hereinbelow.

[0019] In addition, the invention provides a fusion protein comprising (or consisting essentially of): (a) a recombinant mutant human sialidase disclosed herein; and (b) an immunoglobulin Fc domain and/or an immunoglobulin antigen-binding domain; wherein the sialidase and the Fc domain and/or the antigen-binding domain are linked by a peptide bond or an amino acid linker. In certain embodiments, the fusion protein further comprises a linker, for example, an amino acid linker, connecting the sialidase enzyme and the Fc domain and/or the antigen-binding domain. In certain embodiments, the immunoglobulin antigen-binding domain is associated (for example, covalently or non-covalently associated) with a second immunoglobulin antigen-binding domain to produce an antigen-binding site.

[0020] In certain embodiments, the immunoglobulin Fc domain is derived from a human IgG1, IgG2, IgG3, IgG4, IgA1, IgA2, IgD, IgE, or IgM Fc domain, e.g., the immunoglobulin Fc domain is derived from a human IgG1, IgG2, IgG3, or IgG4 Fc domain, e.g., the immunoglobulin Fc domain is derived from a human IgG1 Fc domain.

[0021] In certain embodiments, the immunoglobulin antigen-binding domain is derived from an antibody selected from trastuzumab, daratumumab, girentuximab, ofatumumab, avelumab and rituximab.

[0022] In certain embodiments, the fusion protein comprises any one of SEQ ID NOs: 203-210, 218, 220, 222, 224, 226, 228, 230, 232, 234, 236, 238, 240, or 242, or an amino acid sequence that has at least 85%, 90%, 95%, 96%, 97%, 98%, or 99% sequence identity to any one of SEQ ID NOs: 203-210, 218, 220, 222, 224, 226, 228, 230, 232, 234, 236, 238, 240, or 242.

[0023] In addition, the invention provides an antibody conjugate comprising any of the foregoing fusion proteins. In certain embodiments, the antibody conjugate comprises a single sialidase. In other embodiments, the antibody conjugate comprises two sialidases, which can be the same or different. In certain embodiments the antibody conjugate comprises two identical sialidases. In certain embodiments, the antibody conjugate comprises a single antigen-binding site. In other embodiments, the antibody conjugate comprises two antigen-binding sites, which can be the same or different. In certain embodiments, the antibody conjugate comprises two identical antigen-binding sites.

[0024] In certain embodiments, the antibody conjugate has a molecular weight from about 135 kDa to about 165 kDa, or the antibody conjugate has a molecular weight from about 215 kDa to about 245 kDa.

[0025] In certain embodiments, the antibody conjugate comprises: (a) a first polypeptide comprising an immunoglobulin light chain; (b) a second polypeptide comprising an immunoglobulin heavy chain; and (c) a third polypeptide comprising an immunoglobulin Fc domain and a sialidase; wherein the first and second polypeptides are covalently linked together and the second and third polypeptides are covalently linked together, and wherein the first polypeptide and the second polypeptide together define an antigen-binding site. The third polypeptide may, for example, comprise the sialidase and the immunoglobulin Fc domain in an N- to C-terminal orientation.

[0026] In certain embodiments, the antibody conjugate comprises: (a) a first polypeptide comprising a first immunoglobulin light chain; (b) a second polypeptide comprising a first immunoglobulin heavy chain and a first sialidase; (c) a third polypeptide comprising a second immunoglobulin heavy chain and a second sialidase; and (d) a fourth polypeptide comprising a second immunoglobulin light chain; wherein the first and second polypeptides are covalently linked together, the third and fourth polypeptides are covalently linked together, and the second and third polypeptides are covalently linked together, and wherein the first polypeptide and the second polypeptide together define a first antigen-binding site, and the third polypeptide and the fourth polypeptide together define a second antigen-binding site. The second and third polypeptides may, for example, comprise the first and second immunoglobulin heavy chain and the first and second sialidase, respectively, in an N- to C-terminal orientation.

[0027] In certain embodiments, the antibody conjugate comprises: (a) a first polypeptide comprising a first sialidase, a first immunoglobulin Fc domain, and a first single chain variable fragment (scFv); and (b) a second polypeptide comprising a second sialidase, a second immunoglobulin Fc domain, and an optional second single chain variable fragment (scFv); wherein the first and second polypeptides are covalently linked together, and wherein the first scFv defines a first antigen-binding site, and the second scFv, when present, defines a second antigen-binding site. The first polypeptide may, for example comprise the first sialidase, the first immunoglobulin Fc domain, and the first scFv in an N- to C-terminal orientation. The second polypeptide may, for example, comprise the second sialidase, the second immunoglobulin Fc domain, and the optional second scFv in an N- to C-terminal orientation.

[0028] In certain embodiments, the antibody conjugate comprises: (a) a first polypeptide comprising an immunoglobulin light chain; (b) a second polypeptide comprising an immunoglobulin heavy chain and a single chain variable fragment (scFv); and (c) a third polypeptide comprising an immunoglobulin Fc domain and a sialidase, wherein the first and second polypeptides are covalently linked together and the second and third polypeptides are covalently linked together, and wherein the immunoglobulin light chain and immunoglobulin heavy chain together define a first antigen-binding site and the scFv defines a second antigen-binding site. The second polypeptide may, for example comprise the immunoglobulin heavy chain and the scFv in an N- to C-terminal orientation. The third polypeptide may, for example, comprise the sialidase and the immunoglobulin Fc domain in an N- to C-terminal orientation.

[0029] In another aspect, the invention provides an isolated nucleic acid comprising a nucleotide sequence encoding any of the foregoing recombinant mutant human sialidases, any of the foregoing fusion proteins, or at least a portion of any of the foregoing antibody conjugates. In another aspect, the invention provides an expression vector comprising any of the foregoing nucleic acids. In another aspect, the invention provides a host cell comprising any of the foregoing expression vectors.

[0030] In another aspect, the invention provides a pharmaceutical composition comprising any of the foregoing recombinant mutant human sialidases, any of the foregoing fusion proteins, or any of the foregoing antibody conjugates.

[0031] In another aspect, the invention provides a method of treating cancer in a subject in need thereof. The method comprises administering to the subject an effective amount of any of the foregoing sialidases, any of the foregoing fusion proteins, any of the foregoing antibody conjugates, or any of the foregoing pharmaceutical compositions. In certain embodiments, the cancer is an epithelial cancer. In certain embodiments, the cancer is a solid tumor, soft tissue tumor, hematopoietic tumor or metastatic lesion. In certain embodiments, the solid tumor is a sarcoma, adenocarcinoma, or carcinoma. In certain embodiments, the solid tumor is a head and neck (e.g., pharynx), thyroid, lung (e.g., small cell or non-small cell lung carcinoma (NSCLC)), breast, lymphoid, gastrointestinal (e.g., oral, esophageal, stomach, liver, pancreas, small intestine, colon and rectum, anal canal), genital or genitourinary tract (e.g., renal, urothelial, bladder, ovarian, uterine, cervical, endometrial, prostate, testicular), CNS (e.g., neural or glial cell, e.g., neuroblastoma or glioma), or skin (e.g., melanoma) tumor. In certain embodiments, the hematopoietic tumor is a leukemia, acute leukemia, acute lymphoblastic leukemia (ALL), B-cell, T-cell or FAB ALL, acute myeloid leukemia (AML), chronic myelocytic leukemia (CML), chronic lymphocytic leukemia (CLL), e.g., transformed CLL, diffuse large B-cell lymphoma (DLBCL), follicular lymphoma, hairy cell leukemia, myelodyplastic syndrome (MDS), lymphoma, Hodgkin's disease, malignant lymphoma, non-Hodgkin's lymphoma, Burkitt's lymphoma, multiple myeloma, or Richter's Syndrome (Richter's Transformation). In certain embodiments, the cancer is selected from an endometrial cancer, ovarian cancer, cervical cancer, vulvar cancer, uterine cancer, fallopian tube cancer, breast cancer, prostate cancer, lung cancer, pancreatic cancer, urinary cancer, bladder cancer, head and neck cancer, oral cancer and liver cancer.

[0032] In another aspect, the invention provides a method of increasing expression of HLA-DR, CD86, CD83, IFNγ, IL-1b, IL-6, TNFα, IL-17A, IL-2, or IL-6 in a cell, tissue, or subject. The method comprises contacting the cell, tissue, or subject with an effective amount of any of the foregoing sialidases, any of the foregoing fusion proteins, any of the foregoing antibody conjugates, or any of the foregoing pharmaceutical compositions. In certain embodiments, the cell is selected from a dendritic cell and a peripheral blood mononuclear cell (PBMC).

[0033] These and other aspects and features of the invention are described in the following detailed description and claims.

### DESCRIPTION OF THE DRAWINGS

[0034] The invention can be more completely understood with reference to the following drawings.

[0035] FIG. 1 depicts an SDS-PAGE gel showing recombinant human Neu1, Neu2, Neu3, and Salmonella typhimurium (St-sialidase) under non-reducing and reducing conditions. Monomer and dimer species are indicated.

[0036] FIG. 2 is a bar graph showing the enzymatic activity of recombinant human Neu1, Neu2, and Neu3.

[0037] FIG. 3 is a line graph showing enzymatic activity as a function of substrate concentration for recombinant human Neu2 and Neu3 at the indicated pH.

[0038] FIG. 4 depicts a schematic representation of an exemplary sialic acid biotinylated probe that can be used in phage display or yeast display screening for Neu2 variants.

[0039] FIG. 5 depicts an exemplary protocol that facilitates phage display screening of Neu2 variants.

[0040] FIG. 6 depicts an exemplary protocol that facilitates yeast display screening of Neu2 variants.

[0041] FIG. 7A depicts an SDS-PAGE gel showing recombinant Neu2-Fc (wildtype) and Neu2-M106-Fc under non-reducing and reducing conditions. FIG. 7B is an SEC-HPLC trace of Neu2-Fc (wildtype) and Neu2-M106-Fc. The monomer species has a retention time of 21 minutes.

[0042] FIG. 8 is a line graph depicting the enzymatic activity of Neu2 variant M106.

[0043] FIGS. 9A-9I depict schematic representations of certain antibody conjugate constructs containing a sialidase enzyme, e.g., a human sialidase enzyme, and an antigen binding site. For each antibody conjugate construct that contains more than one (e.g., two) sialidase, each sialidase may be the same or different. For each antibody conjugate construct that contains more than one (e.g., two) antigen binding site, each antigen binding site may be the same or different. For each antibody conjugate construct that contains an Fc domain, it is understood that the Fc domain can be a wild type Fc domain or can be an engineered Fc domain. For example, the Fc domain may be engineered to contain either a “knob” mutation, e.g., T366Y, or a “hole” mutation, e.g., Y407T, or both, to promote heterodimerization, or the Fc domain may be engineered to contain one or more modifications, e.g., point mutations, to provide any other modified Fc domain functionality.

[0044] FIG. 10 depicts schematic representations of certain antibody conjugate constructs containing a sialidase enzyme, e.g., a human sialidase enzyme, and an antigen binding site. For each antibody conjugate construct that contains more than one (e.g., two) antigen binding site, each antigen binding site may be the same or different. For each antibody conjugate construct that contains an Fc domain, it is understood that the Fc domain can be a wild type Fc domain or can be an engineered Fc domain. For example, the Fc domain may be engineered to contain either a “knob” mutation, e.g., T366Y, or a “hole” mutation, e.g., Y407T, or both, to promote heterodimerization, or the Fc domain may be engineered to contain one or more modifications, e.g., point mutations, to provide any other modified Fc domain functionality.

[0045] FIGS. 11A-11E are schematic representations of exemplary fusion protein conjugates referred to as a Raptor antibody sialidase conjugate (FIG. 11A), a Janus antibody sialidase conjugate (FIG. 11B), a Lobster antibody sialidase conjugate (FIG. 11C), a Bunk antibody sialidase conjugate (FIG. 11D), and a Lobster-Fab antibody sialidase conjugate (FIG. 11E).

[0046] FIG. 12 depicts an SDS-PAGE gel showing purified recombinant human Janus Trastuzumab under non-reducing and reducing conditions.

[0047] FIG. 13 depicts an SEC-HPLC trace of purified Janus Trastuzumab, showing approximately 90% monomer purity.

[0048] FIG. 14 depicts the enzyme activity of Janus Trastuzumab assayed using 4-MU-Neu5Ac as a substrate.

[0049] FIG. 15 depicts binding to HER2 antigen as determined by ForteBio Octet for Janus Trastuzumab (top), and trastuzumab (bottom). Equilibrium dissociation constants (KD) are indicated.

[0050] FIGS. 16A-D depict the testing of various configurations of antibody sialidase conjugates in a mouse syngeneic tumor model utilizing EMT6 mouse breast cancer cells engineered to express human HER2. Mice are treated via intraperitoneal injection of 10 mg/kg of each test article on the days marked with black triangles and tumor volume (mm³) recorded. Each line represents an individual mouse. Mice are treated with either trastuzumab (FIG. 16A), Raptor (FIG. 16B), Janus (FIG. 16C) or Lobster (FIG. 16D).

[0051] FIGS. 17A-D depict the testing of the Janus antibody sialidase conjugate in a mouse syngeneic tumor model utilizing EMT6 mouse breast cancer cells engineered to express human HER2. Mice were treated via intraperitoneal injection of 10 mg/kg of Janus on the days marked with black triangles and tumor volume (mm³) recorded. Mice were also treated on the same days as Janus with either anti-mouse NK1.1 (10 mg/kg) to deplete natural killer cells (FIG. 17A), liposomal clodronate (0.5 mg/mouse, three times a week for two weeks) to deplete macrophages (FIG. 17B), or anti-mouse CD8a (10 mg/kg) to deplete CD8+ T cells (FIG. 17C). Each line represents an individual mouse. FIG. 17D depicts the mean tumor volume with error bars of the indicated treatment groups from Example 5.

[0052] FIGS. 18A-B depict the testing of the Janus antibody sialidase conjugate in a mouse syngeneic orthotopic tumor model utilizing a second source of EMT6 mouse breast cancer cells engineered to express human HER2. Mice are treated via intraperitoneal injection of 10 mg/kg of each test article on the days marked with black triangles and tumor volume (mm³) recorded. Each line represents an individual mouse. Mice are treated (Y) with either vehicle, trastuzumab, Janus or Janus Loss of Function (FIG. 18A). FIG. 18B depicts the rechallenge experiment of either the three mice treated with Janus from FIG. 18A with complete regressions of the original EMT6-HER2 tumors (cured mice) or naïve mice. Cured mice were inoculated with either EMT6-HER2 cells or parental EMT6 cells on the left and right lower flank region. Naïve mice were inoculated with EMT6-HER2 cells.

[0053] FIGS. 19A-B depict the testing of the Janus antibody sialidase conjugate in a mouse syngeneic orthotopic tumor model in combination with anti-mouse PD1. Mice are treated via intraperitoneal injection of 10 mg/kg of either anti-mouse PD1 alone (FIG. 19A) or Janus and anti-mouse PD1 (10 mg/kg of each, FIG. 19B) on the days marked with black triangles (▾) and tumor volume (mm³) recorded. Each line represents an individual mouse.

[0054] FIG. 20 depicts the testing of various test articles in a mouse syngeneic tumor model injected with a B16 melanoma cell line expressing human HER2. Mice are treated via intraperitoneal injection of 10 mg/kg of either Janus, trastuzumab or a combination of anti-mouse PD1 and anti-mouse CTLA4 (10 mg/kg of each) on the days marked with black triangles (▾) and tumor volume (mm³) recorded. Each line represents an individual mouse.

[0055] FIG. 21 depicts the testing of Janus Trastuzumab in a mouse syngeneic tumor model utilizing EMT6 mouse breast cancer cells engineered to express human HER2. Each line represents an individual mouse. Tick marks indicate dosing frequency (total of 5 doses, biweekly). Mice are treated with either Janus Trastuzumab or isotype control.

[0056] FIG. 22A depicts an SDS-PAGE gel showing Neu2-M173-Fc under non-reducing and reducing conditions. FIG. 22B is an SEC-HPLC trace of Neu2-M173-Fc. The monomer species has a retention time of 6.367 minutes. The monomer species has a purity of approximately 90% after purification by Protein A and CHT chromatography.

[0057] FIG. 23 depicts the enzyme activity of Neu2-M173-Fc, using 4-MU-Neu5Ac as the substrate, and fixing enzyme concentration to 2 μg/well.

[0058] FIG. 24A depicts an SDS-PAGE gel showing Neu2-M106 under non-reducing (NR) and reducing (R) conditions. FIG. 24B depicts a schematic representation of the Neu2 structure with the position of the R243 cleavage site indicated.

[0059] FIG. 25 depicts a reducing SDS-PAGE gel showing Neu2-M106 produced by a large or small scale expression with (+) or without (−) trypsin treatment.

[0060] FIG. 26 depicts an SDS-PAGE gel showing Neu2-M106 following incubation with trypsin and one of the protease inhibitors iron citrate (Fe Cit), aprotinin, AEBSF, leupeptin, or E-64 at the indicated concentrations.

[0061] FIG. 27A is a table depicting a sequence alignment of different sialidase sequences, showing conservation of the P1 arginine, which is a protease cleavage site.

[0062] FIG. 27B is a chart showing different mutations and combinations of mutations surrounding the trypsin cleavage site in Neu2.

[0063] FIG. 28A depicts a reducing SDS-PAGE analysis of Neu2 variants with the indicated mutation at position A242 with or without trypsin treatment. Trypsin digestion was for 5 minutes at 4° C. using a 5,000% dilution of trypsin. The digestion was quenched by addition of SDS, and 2 μg of protein was loaded on the gel. FIG. 28B depicts the enzymatic activity of Neu2 variants with the indicated mutation at position A242. FIG. 28C is an SEC-HPLC trace of Neu2 variants with the indicated mutation at position A242. Neu2-M106 (the mutational background in which the mutations at position A242 were tested) is shown as a control.

[0064] FIG. 29 depicts a reducing SDS-PAGE analysis of the indicated Neu2 variants with or without trypsin treatment. Neu2-M106 is shown as a control. For example, Neu2-M255 was shown to have a greater than 10 fold improved trypsin resistance relative to Neu2-M106.

[0065] FIG. 30A depicts an SDS-PAGE gel showing recombinant Neu2-M259-Fc under non-reducing and reducing conditions. FIG. 30B is an SEC-HPLC trace of Neu2-M259-Fc.

[0066] FIG. 31A is a line graph showing enzymatic activity of the indicated Neu2-Fc variants as a function of substrate (4-MU-Neu5Ac) concentration. FIG. 31B is a line graph showing enzymatic activity of the indicated Neu2-Fc variants as a function of enzyme concentration.

[0067] FIG. 32 is a line graph depicting thermal stability of the indicated Neu2-Fc variants.

[0068] FIG. 33 depicts testing of a Neu2-Fc fusion protein in a mouse syngeneic subcutaneous tumor model. Mean tumor volumes over 21 days for the indicated treatments are indicated in FIG. 33A. Triangles indicate dosing. Individual tumor volumes on day 21 are depicted in FIG. 33B.

[0069] FIG. 34 is a bar graph depicting enzymatic activity of the indicated Neu2-Fc variants following incubation at 37° C. for the indicated length of time.

[0070] FIG. 35 is an SEC-HPLC trace of Janus Trastuzumab 2.

[0071] FIG. 36 depicts binding to HER2 antigen as determined by ForteBio Octet for Janus Trastuzumab 2.

[0072] FIG. 37 depicts the testing of Janus Trastuzumab 2 in a mouse syngeneic tumor model utilizing EMT6 mouse breast cancer cells engineered to express human HER2, where tumor volume was measured after treatment with an isotype control (FIG. 37A), 1 mg/kg Trastuzumab (FIG. 37B), 10 mg/kg Trastuzumab (FIG. 37C), 1 mg/kg Janus Trastuzumab 2 (FIG. 37D), or 10 mg/kg Janus Trastuzumab 2 (FIG. 37E), where each line represents an individual mouse, and in FIG. 37F, each line represents the mean tumor volume for the indicated treatment group. Triangles indicate dosing frequency. In FIGS. 37A-E, Complete Responses (CR) and Partial Responses (PR) are indicated.

[0073] Various features and aspects of the invention are discussed in more detail below.

### DETAILED DESCRIPTION

[0074] The invention relates to a recombinant sialidase (e.g., a recombinant human sialidase) that comprises at least one mutation relative to a wild-type sialidase, e.g., a substitution, deletion, or addition (insertion) of at least one amino acid. The mutation may, for example, enhance resistance (decrease sensitivity) to protease (e.g., trypsin) degradation. Alternatively or in addition, the sialidase may include a mutation, or a combination of mutations, that can improve the expression, activity or both the expression and activity of the sialidase.

[0075] The invention further provides fusion proteins and/or antibody conjugates comprising a mutant sialidase enzyme and an antibody or portion thereof, e.g., an immunoglobulin Fc domain and/or an antigen-binding domain. The sialidase enzyme portion of the fusion protein and/or antibody conjugate comprises at least one mutation relative to a wild-type sialidase (for example, a mutation that increases resistance to protease (e.g., trypsin) degradation). The sialidase can also include one or more of the other mutations described herein that improve expression and/or activity of the sialidase.

[0076] The invention further relates to pharmaceutical compositions and methods of using fusion proteins and/or antibody conjugates to treat cancer, e.g., a solid tumor, soft tissue tumor, hematopoietic tumor, metastatic lesion, or an epithelial cell cancer.

### I. Recombinant Human Sialidases

[0077] As used herein, the term “sialidase” refers to any enzyme, or a functional fragment thereof, that cleaves a terminal sialic acid residue from a substrate, for example, a glycoprotein or a glycolipid. The term sialidase includes variants having one or more amino acid substitutions, deletions, or insertions relative to a wild-type sialidase sequence, and/or fusion proteins or conjugates including a sialidase. Sialidases are also called neuraminidases, and, unless indicated otherwise, the two terms are used interchangeably herein. As used herein, the term “functional fragment” of a sialidase refers to fragment of a full-length sialidase that retains, for example, at least 10%, at least 20%, at least 30%, at least 40%, at least 50%, at least 60%, at least 70%, at least 80%, at least 90%, at least 95%, or 100% of the enzymatic activity of the corresponding full-length, naturally occurring sialidase. Sialidase enzymatic activity may be assayed by any method known in the art, including, for example, by measuring the release of sialic acid from the fluorogenic substrate 4-methylumbelliferyl-N-acetylneuraminic acid (4MU-NeuAc). In certain embodiments, the functional fragment comprises at least 100, 150, 200, 250, 300, 310, 320, 330, 340, 350, 360, or 370 consecutive amino acids present in a full-length, naturally occurring sialidase.

[0078] Four sialidases have been found in the human genome and are referred to as Neu1, Neu2, Neu3 and Neu4.

[0079] Human Neu1 is a lysosomal neuraminidase enzyme which functions in a complex with beta-galactosidase and cathepsin A. The amino acid sequence of human Neu1 is depicted in SEQ ID NO: 7, and a nucleotide sequence encoding human Neu1 is depicted in SEQ ID NO: 23.

[0080] Human Neu2 is a cytosolic sialidase enzyme. The amino acid sequence of human Neu2 is depicted in SEQ ID NO: 1, and a nucleotide sequence encoding human Neu2 is depicted in SEQ ID NO: 24. Unless stated otherwise, as used herein, wild-type human Neu2 refers to human Neu2 having the amino acid sequence of SEQ ID NO: 1.

[0081] Human Neu3 is a plasma membrane sialidase with an activity specific for gangliosides. Human Neu3 has two isoforms: isoform 1 and isoform 2. The amino acid sequence of human Neu3, isoform 1 is depicted in SEQ ID NO: 8, and a nucleotide sequence encoding human Neu3, isoform 1 is depicted in SEQ ID NO: 25. The amino acid sequence of human Neu3, isoform 2 is depicted in SEQ ID NO: 9, and a nucleotide sequence encoding human Neu3, isoform 2 is depicted in SEQ ID NO: 34.

[0082] Human Neu4 has two isoforms: isoform 1 is a peripheral membrane protein and isoform 2 localizes to the lysosome lumen. The amino acid sequence of human Neu4, isoform 1 is depicted in SEQ ID NO: 10, and a nucleotide sequence encoding human Neu4, isoform 1 is depicted in SEQ ID NO: 26. The amino acid sequence of human Neu4, isoform 2 is depicted in SEQ ID NO: 11, and a nucleotide sequence encoding human Neu4, isoform 2 is depicted in SEQ ID NO: 35.

[0083] Four sialidases have also been found in the mouse genome and are referred to as Neu1, Neu2, Neu3 and Neu4. The amino acid sequence of mouse Neu1 is depicted in SEQ ID NO: 38, and a nucleotide sequence encoding mouse Neu1 is depicted in SEQ ID NO: 42. The amino acid sequence of mouse Neu2 is depicted in SEQ ID NO: 39 and a nucleotide sequence encoding mouse Neu2 is depicted in SEQ ID NO: 43. The amino acid sequence of mouse Neu3 is depicted in SEQ ID NO: 40, and a nucleotide sequence encoding mouse Neu3 is depicted in SEQ ID NO: 44. The amino acid sequence of mouse Neu4 is depicted in SEQ ID NO: 41, and a nucleotide sequence encoding mouse Neu4 is depicted in SEQ ID NO: 45.

[0084] Exemplary prokaryotic sialidases include sialidases from Salmonella typhimurium and Vibrio cholera. The amino acid sequence of Salmonella typhimurium sialidase (St-sialidase) is depicted in SEQ ID NO: 30, and a nucleotide sequence encoding Salmonella typhimurium sialidase is depicted in SEQ ID NO: 6. The amino acid sequence of Vibrio cholera sialidase is depicted in SEQ ID NO: 36, and a nucleotide sequence encoding Vibrio cholera sialidase is depicted in SEQ ID NO: 37.

[0085] In certain embodiments, a recombinant mutant sialidase (e.g., human sialidase) has at least about 5%, at least about 10%, at least about 15%, at least about 20%, at least about 25%, at least about 30%, at least about 35%, at least about 40%, at least about 45%, at least about 50%, at least about 55%, at least about 60%, at least about 65%, at least about 70%, at least about 75%, at least about 80%, at least about 85%, at least about 90%, at least about 95%, about 100%, or more than 100% of the enzymatic activity of a corresponding (or template) wild-type sialidase (e.g., human sialidase).

[0086] In certain embodiments, a recombinant mutant sialidase (e.g., human sialidase) has about 5%, about 10%, about 15%, about 20%, about 25%, about 30%, about 35%, about 40%, about 45%, about 50%, about 55%, about 60%, about 65%, about 70%, about 75%, about 80%, about 85%, about 90%, about 95%, about 100%, or more than 100% of the enzymatic activity of a corresponding (or template) wild-type sialidase (e.g., human sialidase).

[0087] In certain embodiments, the recombinant mutant sialidase (e.g., human sialidase) has the same substrate specificity as the corresponding wild-type sialidase (e.g., human sialidase). In other embodiments, the recombinant mutant sialidase (e.g., human sialidase) has a different substrate specificity than the corresponding wild-type sialidase (e.g., human sialidase). For example, in certain embodiments the recombinant mutant human sialidase can cleave α2,3, α2,6, and/or α2,8 linkages. In certain embodiments the sialidase can cleave α2,3 and α2,8 linkages.

[0088] In certain embodiments, the expression yield of the recombinant mutant sialidase (e.g., human sialidase) sialidase in mammalian cells, e.g., HEK293 cells, CHO cells, murine myeloma cells (e.g., NS0, Sp2/0), or human fibrosarcoma cells (e.g., HT-1080), is greater than about 10%, about 20%, about 50%, about 75%, about 100%, about 150%, about 200%, about 250%, about 300%, about 400%, about 500%, about 600%, about 700%, about 800%, about 900%, or about 1,000% of the expression yield of the corresponding wild-type sialidase (e.g., human sialidase).

[0089] In certain embodiments, the recombinant mutant sialidase (e.g., human sialidase) has about 5%, about 10%, about 15%, about 20%, about 25%, about 30%, about 35%, about 40%, about 45%, about 50%, about 55%, about 60%, about 65%, about 70%, about 75%, about 80%, about 85%, about 90%, about 95%, about 100%, or more than 100% of the enzymatic activity of a corresponding wild-type sialidase (e.g., human sialidase), and the expression yield of the recombinant mutant sialidase (e.g., human sialidase) in mammalian cells, e.g., HEK293 cells, is greater than about 10%, about 20%, about 50%, about 75%, about 100%, about 150%, about 200%, about 250%, about 300%, about 400%, about 500%, about 600%, about 700%, about 800%, about 900%, or about 1,000% of the expression yield of a corresponding sialidase (e.g., human sialidase) human sialidase.

[0090] In certain embodiments, the amino acid sequence of the recombinant mutant sialidase (e.g., human sialidase) has at least 50%, 55%, 60%, 65%, 70%, 75%, 80%, 85%, 90%, 95%, 96%, 97%, 98%, or 99% sequence identity to the amino acid sequence of a corresponding wild-type sialidase (e.g., human sialidase).

[0091] a. Substitutions of Residues to Decrease Proteolytic Cleavage

[0092] It has been discovered that certain sialidases (e.g., human Neu2) are susceptible to cleavage by a protease (e.g., trypsin). As a result, proteolytic cleavage of the sialidase may occur during recombinant protein production, harvesting, purification, or formulation, during administration to a subject, or after administration to a subject. Accordingly, in certain embodiments, the recombinant mutant sialidase (e.g., human sialidase) comprises a substitution of at least one wild-type amino acid residue, wherein the substitution decreases cleavage of the sialidase by a protease (e.g., trypsin) relative to a sialidase without the substitution.

[0093] In certain embodiments, the protease is a trypsin (e.g., a mammalian trypsin, a bovine trypsin, a human trypsin such as trypsin 1, trypsin 2, or mesotrypsin, a cod trypsin, a Streptomyces griseus trypsin, a Saccharopolyspora erythraeus trypsin, a Streptomyces exfoliatus trypsin, and a Streptomyces albidoflavus trypsin), α-lytic protease, or a serine protease such as kallikreins, elastase and chymotrypsin.

[0094] In certain embodiments, incubation of the recombinant mutant sialidase (e.g., human sialidase) with a protease (e.g., trypsin) results in from about 1% to about 50%, from about 1% to about 40%, from about 1%, to about 30%, from about 1% to about 20%, from about 1% to about 10%, from about 1% to about 5%, from about 5% to about 50%, from about 5% to about 40%, from about 5% to about 30%, from about 5% to about 20%, from about 5% to about 10%, from about 10% to about 50%, from about 10% to about 40%, from about 10% to about 30%, from about 10% to about 20%, from about 20% to about 50%, from about 20% to about 40%, from about 20% to about 30%, from about 30% to about 50%, from about 30% to about 40%, or from about 40% to about 50% of the proteolytic cleavage of a corresponding sialidase (e.g., wild-type sialidase) without the mutation when incubated with the protease under the same conditions. In certain embodiments, incubation of the recombinant mutant sialidase (e.g., human sialidase) with a protease (e.g., trypsin) results in less than 50%, less than 40%, less than 30%, less than 10%, less than 5%, less than 3%, less than 1%, or less than 0.5% of the proteolytic cleavage of a corresponding sialidase (e.g., wild-type sialidase) without the mutation(s) when incubated with the protease under the same conditions.

[0095] Proteolytic cleavage can be assayed by any method known in the art, including for example, by SDS-PAGE as described in Example 5 herein.

[0096] As shown in FIG. 27A, the arginine residue at a position corresponding to position 243 of wild-type human Neu2 (SEQ ID NO: 1) is conserved among many different sialidases. Accordingly, it is believed that mutating amino acids nearby this conserved arginine residue can reduce proteolytic cleavage of the sialidase. Thus, in certain embodiments, mutations within about 5 amino acid, about 4 amino acids, about 3 amino acids, or about 2 amino acids of the arginine residue at a position corresponding to position 243 of wild-type human Neu2 (SEQ ID NO: 1) can be substituted to increase resistance to proteolytic cleavage.

[0097] Exemplary substitutions that increase resistance to proteolytic cleavage include: (i) a substitution of an alanine residue at a position corresponding to position 242 of wild-type human Neu2 (SEQ ID NO: 1), e.g., a substitution by cysteine (A242C), phenylalanine (A242F), glycine (A242G), histidine (A242H), isoleucine (A242I), lysine (A242K), leucine (A242L), methionine (A242M), asparagine (A242N), glutamine (A242Q), arginine (A242R), serine (A242S), valine (A242V), tryptophan (A242W), or tyrosine (A242Y); (ii) a substitution of an arginine residue at a position corresponding to position 243 of wild-type human Neu2 (SEQ ID NO: 1), e.g., a substitution by glutamic acid (R243E), histidine (R243H), asparagine (R243N), glutamine (R243Q), or lysine (R243K); (iii) a substitution of a valine residue at a position corresponding to position 244 of wild-type human Neu2 (SEQ ID NO: 1), e.g., a substitution by isoleucine (V244I), lysine (V244K), or proline (V244P); or (iv) a combination of any of the foregoing. In certain embodiments, the alanine at a position corresponding to position 242 of wild-type human Neu2 is substituted by an aromatic amino acid, e.g., tryptophan (A242W), tyrosine (A242Y), or phenylalanine (A242F). In certain embodiments, the alanine at a position corresponding to position 242 of wild-type human Neu2 is substituted by cysteine (A242C). In certain embodiments, the recombinant mutant human sialidase or the recombinant non-human sialidase comprises a substitution or combination of substitutions corresponding to a substitution or combination of substitutions listed in TABLE 1 (amino acid positions corresponding to wild-type human Neu2 (SEQ ID NO: 1)).

TABLE 1

| Wild Type | |
|---|---|
| Human Neu2 | |
| (SEQ ID NO: 1) | |
| Amino Acid | Exemplary Substitution(s) at Specified Position(s) |
| A242 | C, F, G, H, I, K, L, M, N, P, Q, R, S, V, W, Y |
| R243 | E, H, N, Q, K |
| V244 | I, K, P |

[0098] Additional exemplary substitutions that increase resistance to proteolytic cleavage (and/or increase expression yield and/or enzymatic activity) include: (i) a substitution of a leucine residue at a position corresponding to position 240 of wild-type human Neu2 (SEQ ID NO: 1), e.g., a substitution by aspartic acid (L240D), asparagine (L240N), or tyrosine (L240Y); (ii) a substitution of an alanine residue at a position corresponding to position 213 of wild-type human Neu2 (SEQ ID NO: 1), e.g., a substitution by cysteine (A213C), asparagine (A213N), serine (A213S), or threonine (A213T); (iii) a substitution of an arginine residue at a position corresponding to position 241 of wild-type human Neu2 (SEQ ID NO: 1), e.g., a substitution by alanine (R241A), aspartic acid (R241D), leucine (R241L), glutamine (R241Q). or tyrosine (R241Y); (iv) a substitution of a serine residue at a position corresponding to position 258 of wild-type human Neu2 (SEQ ID NO: 1), e.g., a substitution by cysteine (S258C); (v) a substitution of a leucine residue at a position corresponding to position 260 of wild-type human Neu2 (SEQ ID NO: 1), e.g., a substitution by aspartic acid (L260D), phenylalanine (L260F), glutamine (L260Q), or threonine (L260T); (vi) a substitution of a valine residue at a position corresponding to position 265 of wild-type human Neu2 (SEQ ID NO: 1), e.g., a substitution by phenylalanine (V265F); or (vii) a combination of any of the foregoing. It is contemplated that, in certain embodiments, a substitution or a combination of substitutions at these positions may improve hydrophobic and/or aromatic interaction between secondary structure elements in the sialidase (e.g., between an α-helix and the nearest β-sheet) thereby stabilizing the structure and improving resistance to proteolytic cleavage.

[0099] In certain embodiments, the recombinant mutant sialidase or the recombinant non-human sialidase comprises a mutation at position L240. In certain embodiments, the recombinant mutant sialidase comprises a combination of mutations at positions (i) A213 and A242, (ii) A213, A242, and S258, (iii) L240 and L260, (iv) R241 and A242, (v) A242 and L260, (vi) A242 and V265, or (vii) L240 and A242. In certain embodiments, the recombinant mutant human sialidase comprises a combination of substitutions selected from (i) A213C, A242F, and S258C, (ii) A213C and A242F, (iii) A213T and A242F, (iv) R241Y and A242F, and (v) L240Y and A242F. In certain embodiments, the recombinant mutant human sialidase or the recombinant non-human sialidase comprises a substitution or combination of substitutions corresponding to a substitution or combination of substitutions listed in TABLE 2 (amino acid positions corresponding to wild-type human Neu2 (SEQ ID NO: 1)).

TABLE 2
Substitution(s)

A242C, V244P
A242R, V244R
A242R, V244H
A242Y, V244P
A242T, V244P
A242N, V244P
A213C, A242F
A213S, A242F
A213T, A242F
A213N, A242F
A213C, A242F, S258C
A242F, L260F
A242F, V265F
L240Y
L240Y, L260F
L240D, L260T
L240N, L260T
L240N, L260D
L240N, L260Q
L240Y, A242F
R241A, A242F
R241Y, A242F

[0100] b. Substitution of Cysteine Residues

[0101] In certain embodiments, the recombinant mutant human sialidase further comprises a substitution of at least one cysteine (cys, C) residue. It has been discovered that certain cysteine residues in sialidases may inhibit expression of functional protein as a result of protein aggregation. Accordingly, in certain embodiments, the recombinant mutant human sialidase contains at least one mutation to remove a free cysteine (e.g., for Neu1 (SEQ ID NO: 7), a mutation of, for example, one or more of C111, C117, C171, C183, C218, C240, C242, and C252; for Neu2 (SEQ ID NO: 1), a mutation of, for example, one or more of C125, C196, C219, C272, C332, and C352; for Neu3 (SEQ ID NO: 8), a mutation of, for example, one or more of C7, C90, C99, C106, C127, C136, C189, C194, C226, C242, C250, C273, C279, C295, C356, C365, C368, C384, C383, C394, and C415; and for Neu4 (SEQ ID NO: 10), a mutation of, for example, one or more of C88, C125, C126, C186, C191, C211, C223, C239, C276, C437, C453, C480, and C481). Free cysteines can be substituted with any amino acid. In certain embodiments, the free cysteine is substituted with serine (ser, S), isoleucine (iso, I), valine (val, V), phenylalanine (phe, F), leucine (leu, L), or alanine (ala, A). Exemplary cysteine substitutions in Neu2 include C125A, C125I, C125S, C125V, C196A, C196L, C196V, C272S, C272V, C332A, C332S, C332V, C352L, and C352V. In certain embodiments, the cysteine at a position corresponding to position 332 of wild-type human Neu2 is substituted by a hydrophobic amino acid, e.g., alanine (C332A), valine (C332V), isoleucine (C332I), or leucine (C332L). In certain embodiments, the cysteine at a position corresponding to position 332 of wild-type human Neu2 is substituted by alanine (C332A).

[0102] In certain embodiments, the recombinant mutant human sialidase comprises two or more cysteine substitutions. Exemplary double or triple cysteine substitutions in Neu2 include: C125S and C332S; C272V and C332A; C272V and C332S; C332A and C352L; C125S and C196L; C196L and C352L; C196L and C332A; C332A and C352L; and C196L, C332A and C352L.

[0103] In certain embodiments, the recombinant mutant human sialidase is a Neu2 sialidase and comprises the substitutions C322A and C352L.

[0104] In certain embodiments, the sialidase contains an amino acid substitution at 2, 3, 4, 5, or 6 cysteines typically present in a human sialidase, e.g., Neu2 or Neu3.

[0105] In certain embodiments, the recombinant mutant human sialidase comprises a substitution or combination of substitutions corresponding to a substitution or combination of substitutions listed in TABLE 3 (amino acid positions corresponding to wild-type human Neu2 (SEQ ID NO: 1)).

TABLE 3
Substitution(s)

C125A
C125I
C125S
C125V
C196A
C196L
C196V
C272S
C272V
C332A
C332S
C332V
C352L
C352V
C125S + C332S
C272V + C332A
C272V + C332S
C332A + C352L
C125S + C196L
C196L + C352L
C196L + C332A
C196L + C332A + C352L

[0106] c. Substitutions of Residues to Increase pI and/or Decrease Hydrophobicity

[0107] In addition the sialidase (e.g., human sialidase) may further comprise one or more substitutions that modify pI (e.g., increase pI) and/or hydrophobicity (e.g., decrease hydrophobicity) of the sialidase.

[0108] The isoelectric point (pI) of a protein is the pH at which the net charge is zero. The pI also generally indicates the pH at which the protein is least soluble, which may affect the ability to express and purify the protein. Generally, a protein has good solubility if its pI is greater than 2 units above the pH of the solution. Human Neu2 has a predicted pI of 7.5. Thus, human Neu2 is least soluble around neutral pH, which is undesirable because expression and physiological systems are at neutral pH. In contrast, the sialidase from Salmonella typhimurium (St-sialidase), which exhibits good solubility and recombinant expression, has a pI of 9.6. Accordingly, to increase expression of human Neu2 or the other human sialidases, a recombinant mutant human sialidase may be designed to contain one or more amino acid substitution(s) wherein the substitution(s) increase(s) the pI of the sialidase relative to a sialidase without the substitution. Additionally, decreasing the number of hydrophobic amino acids on the surface of a sialidase may improve expression of sialidase by, for example, reducing aggregation. Accordingly, to increase expression of human Neu2 or the other human sialidases, a recombinant mutant human sialidase may be designed to contain one or more amino acid substitution(s) wherein the substitution(s) decrease(s) the hydrophobicity of a surface of the sialidase relative to a sialidase without the substitution(s).

[0109] Accordingly, in certain embodiments, the recombinant mutant human sialidase comprises at least one amino acid substitution, wherein the substitution increases the isoelectric point (pI) of the sialidase and/or decreases the hydrophobicity of the sialidase relative to a sialidase without the substitution. This may be achieved by introducing one or more charged amino acids, for example, positively or negatively charged amino acids, into the recombinant sialidase. In certain embodiments, the amino acid substitution is to a charged amino acid, for example, a positively charged amino acid such as lysine (lys, K), histidine (his, H), or arginine (arg, R), or a negatively charged amino acid such as aspartic acid (asp, D) or glutamic acid (glu, E). In certain embodiments, the amino acid substitution is to a lysine residue. In certain embodiments, the substitution increases the pI of the sialidase to about 7.75, about 8, about 8.25, about 8.5, about 8.75, about 9, about 9.25, about 9.5, or about 9.75.

[0110] In certain embodiments, the amino acid substitution occurs at a surface exposed D or E amino acid, in a helix or loop, or in a position that has a K or R in the corresponding position of St-sialidase. In certain embodiments, the amino acid substitution occurs at an amino acid that is remote from the catalytic site or otherwise not involved in catalysis, an amino acid that is not conserved with the other human Neu proteins or with St-Sialidase or Clostridium NanH, or an amino acid that is not located in a domain important for function (e.g., an Asp-box or beta strand).

[0111] Exemplary amino acid substitutions in Neu2 that increase the isoelectric point (pI) of the sialidase and/or decrease the hydrophobicity of the sialidase relative to a sialidase without the substitution include A2E, A2K, D215K, V325E, V325K, E257K, and E319K. In certain embodiments, the recombinant mutant human sialidase comprises two or more amino acid substitutions, including, for example, A2K and V325E, A2K and V325K, E257K and V325K, A2K and E257K, and E257K and A2K and V325K.

[0112] In certain embodiments, the recombinant mutant human sialidase comprises a substitution or combination of substitutions corresponding to a substitution or combination of substitutions listed in TABLE 4 (amino acid positions corresponding to wild-type human Neu2 (SEQ ID NO: 1)).

TABLE 4
Substitution(s)

A2K
E72K
D215K
E257K
V325K
A2K + E257K
A2K + V325E
A2K + V325K
E257K + V325K

[0113] d. Addition of N-terminal Peptides and N- or C-terminal Substitutions

[0114] In addition, the sialidase (e.g., human sialidase) may further comprise an N-terminal peptide and/or N- or C-terminal substitutions.

[0115] It has been discovered that the addition of a peptide sequence of two or more amino acids to the N-terminus of a human sialidase can improve expression and/or activity of the sialidase. In certain embodiments, the peptide is at least 2 amino acids in length, for example, from 2 to 20, from 2 to 10, from 2 to 5, or 2, 3, 4, 5, 6, 7, 8, 9, 10, 11, 12, 13, 14, 15, 16, 17, 18, 19, or 20 amino acids in length. In certain embodiments, the peptide may form, or have a propensity to form, an α-helix.

[0116] In mice, a Neu2 isoform (type B) found in thymus contains six amino acids not present in the canonical isoform of Neu2 found in skeletal muscle. In certain embodiments herein, the N-terminal six amino acids of the mouse thymus Neu2 isoform, MEDLRP (SEQ ID NO: 4), or variations thereof, can be added onto a human Neu, e.g., human Neu2. In certain embodiments, the recombinant mutant human sialidase comprises a peptide at least two amino acid residues in length covalently associated with an N-terminal amino acid of the sialidase. In certain embodiments the recombinant mutant human sialidase comprises the peptide MEDLRP (SEQ ID NO: 4) or EDLRP (SEQ ID NO: 3) covalently associated with an N-terminal amino acid of the sialidase. In certain embodiments, the sialidase may further comprise a cleavage site, e.g., a proteolytic cleavage site, located between the peptide, e.g., MEDLRP (SEQ ID NO: 4) or EDLRP (SEQ ID NO: 3), and the remainder of the sialidase. In certain embodiments, the peptide, e.g., MEDLRP (SEQ ID NO: 4) or EDLRP (SEQ ID NO: 3), may be post-translationally cleaved from the remainder of the sialidase.

[0117] Alternatively to, or in combination with, the N-terminal addition, 1-5 amino acids of the 12 amino acid N-terminal region of the recombinant mutant human sialidase may be removed, e.g., the N-terminal methionine can be removed. In certain embodiments, if the recombinant mutant human sialidase is Neu2, the N-terminal methionine can be removed, the first five amino acids (MASLP; SEQ ID NO: 12) can be removed, or the second through fourth amino acids (ASLP; SEQ ID NO: 13) can be removed.

[0118] In certain embodiments, 1-5 amino acids of the 12 amino acid N-terminal region of the recombinant mutant human sialidase are substituted with MEDLRP (SEQ ID NO: 4), EDLRP (SEQ ID NO: 3), or TVEKSVVF (SEQ ID NO: 14). For example, in certain embodiments, if the recombinant mutant human sialidase is Neu2, the amino acids MASLP (SEQ ID NO: 12), ASLP (SEQ ID NO: 13) or M are substituted with MEDLRP (SEQ ID NO: 4), EDLRP (SEQ ID NO: 3) or TVEKSVVF (SEQ ID NO: 14).

[0119] Human sialidases have a β-propeller structure, characterized by 6 blade-shaped β-sheets arranged toroidally around a central axis. Generally, hydrophobic interactions between the blades of a β-propeller, including between the N- and C-terminal blades, enhance stability. Accordingly, in order to increase expression of human Neu2 or the other human sialidases, a recombinant mutant human sialidase can be designed comprising an amino acid substitution that increases hydrophobic interactions and/or hydrogen bonding between the N- and C-terminal β-propeller blades of the sialidase.

[0120] Accordingly, in certain embodiments, the recombinant mutant human sialidase comprises a substitution of at least one wild-type amino acid residue, wherein the substitution increases hydrophobic interactions and/or hydrogen bonding between the N- and C-termini of the sialidase relative to a sialidase without the substitution. In certain embodiments, the wild-type amino acid is substituted with asparagine (asn, N), lysine (lys, K), tyrosine (tyr, Y), phenylalanine (phe, F), or tryptophan (trp, W). Exemplary substitutions in Neu2 that increase hydrophobic interactions and/or hydrogen bonding between the N- and C-termini include L4N, L4K, V6Y, L7N, L4N and L7N, L4N and V6Y and L7N, V12N, V12Y, V12L, V6Y, V6F, or V6W. In certain embodiments, the valine at a position corresponding to position 6 of wild-type human Neu2 is substituted by an aromatic amino acid, e.g., tryptophan (V6W), tyrosine (V6Y), or phenylalanine (V6F). In certain embodiments, the sialidase comprises the V6Y substitution.

[0121] In certain embodiments, the recombinant mutant human sialidase comprises a combination of the above substitutions. For example, a recombinant mutant human Neu2 sialidase can comprise the additional amino acids MEDLRP (SEQ ID NO: 4), EDLRP (SEQ ID NO: 3), or TVEKSVVF (SEQ ID NO: 14) at the N-terminus and, in combination, can comprise at least one L4N, L4K, V6Y, L7N, L4N and L7N, L4N and V6Y and L7N, V12N, V12Y, V12L, V6Y, V6F, or V6W substitution. In certain embodiments, the amino acids MASLP (SEQ ID NO: 12), ASLP (SEQ ID NO: 13) or M of a recombinant mutant human Neu2 sialidase are replaced with MEDLRP (SEQ ID NO: 4), EDLRP (SEQ ID NO: 3) or TVEKSVVF (SEQ ID NO: 14) and the recombinant mutant human Neu2 sialidase also comprises at least one L4N, L4K, V6Y, L7N, L4N and L7N, L4N and V6Y and L7N, V12N, V12Y, V12L, V6Y, V6F, or V6W substitution.

[0122] In certain embodiments, the recombinant mutant human sialidase comprises a mutation or combination of mutations corresponding to a mutation or combination of mutations listed in TABLE 5 (amino acid positions corresponding to wild-type human Neu2 (SEQ ID NO: 1)).

TABLE 5
Mutation(s)
Substitute M at the N-terminus with EDLRP (SEQ ID NO: 3)
Substitute M at the N-terminus with MEDLRP (SEQ ID NO: 4)
Insert MEDLRP (SEQ ID NO: 4) at the N-terminus
Substitute MASLP (SEQ ID NO: 12) at the N-terminus with
MEDLRP (SEQ ID NO: 4)
L4N
V6Y
L7N
V6F
V6W

[0123] Additionally, in certain embodiments, the sialidase comprises a substitution or deletion of an N-terminal methionine at the N-terminus of the sialidase. For example, in certain embodiments, the sialidase comprises a substitution of a methionine residue at a position corresponding to position 1 of wild-type human Neu2 (SEQ ID NO: 1). In certain embodiments, the methionine at a position corresponding to position 1 of wild-type human Neu2 is substituted by alanine (M1A). In certain embodiments, the methionine at a position corresponding to position 1 of wild-type human Neu2 is substituted by a negatively charged amino acid, e.g., glutamic acid (M1E) or aspartic acid (M1D). In certain embodiments, the methionine at a position corresponding to position 1 of wild-type human Neu2 is substituted by aspartic acid (M1D). In other embodiments, the sialidase comprises a deletion of a methionine residue at a position corresponding to position 1 (ΔM1) of wild-type human Neu2 (SEQ ID NO: 1).

[0124] In certain embodiments, the recombinant mutant human sialidase comprises a substitution or combination of substitutions corresponding to a substitution or combination of substitutions listed in TABLE 6 (amino acid positions corresponding to wild-type human Neu2 (SEQ ID NO: 1)).

TABLE 6
Mutation(s)
Deletion of M1, V6Y, I187K
M1R, V6Y, I187K
M1H, V6Y, I187K
M1K, V6Y, I187K
M1D, V6Y, I187K
M1T, V6Y, I187K
M1N, V6Y, I187K
M1Q, V6Y, I187K
M1G, V6Y, I187K
M1A, V6Y, I187K
M1V, V6Y, I187K
M1L, V6Y, I187K
M1F, V6Y, I187K
M1Y, V6Y, I187K

[0125] e. Other Substitutions

[0126] In addition, the sialidase may further comprise at least one of the following substitutions: A328E, K370N, or H210N. In certain embodiments, the isoleucine at a position corresponding to position 187 of wild-type human Neu2 is substituted by a positively charged amino acid, e.g., lysine (I187K) or arginine (I187R). In certain embodiments, the isoleucine at a position corresponding to position 187 of wild-type human Neu2 is substituted by lysine (I187K). In certain embodiments, a recombinant mutant human Neu2 comprises the substitution of the amino acids GDYDAPTHQVQW (SEQ ID NO: 15) with the amino acids SMDQGSTW (SEQ ID NO: 16) or STDGGKTW (SEQ ID NO: 17). In certain embodiments, a recombinant mutant human Neu2 comprises the substitution of the amino acids PRPPAPEA (SEQ ID NO: 18) with the amino acids QTPLEAAC (SEQ ID NO: 19). In certain embodiments, a recombinant mutant human Neu2 comprises the substitution of the amino acids NPRPPAPEA (SEQ ID NO: 20) with the amino acids SQNDGES (SEQ ID NO: 21).

[0127] The invention further provides a recombinant mutant human sialidase comprising at least one substitution at a position corresponding to V212, A213, Q214, D215, T216, L217, E218, C219, Q220, V221, A222, E223, V224, E225, or T225.

[0128] The invention further provides a recombinant mutant human sialidase comprising an amino acid substitution at a position identified in TABLE 7 (amino acid positions corresponding to wild-type human Neu2 (SEQ ID NO: 1). In certain embodiments, the sialidase comprises an amino acid substitution identified in TABLE 7. In certain embodiments, the sialidase comprises a combination of any amino acid substitutions identified in TABLE 7.

TABLE 7

| Wild Type | |
|---|---|
| Human Neu2 | |
| (SEQ ID NO: 1) | Exemplary Substitution(s) at Specified |
| Amino Acid | Position(s) |
| M1 | D |
| L4 | S, T, Y, L, F, A, P, V, I, N, D, or H |
| P5 | G |
| V6 | Y |
| L7 | F, Y, S, I, T, or N |
| K9 | D |
| V12 | L, A, P, V, N, D, or H |
| F13 | S, N, R, K, T, G, D, E, or A |
| I22 | S, N, R, K, T, G, D, E, A, Y, L, F, P, V, I, or H |
| A24 | S, N, R, K, T, G, D, E, A, Y, L, F, P, V, I, or H |
| L34 | S, T, Y, L, F, A, P, V, I, N, D, or H |
| A36 | S, T, Y, L, F, A, P, V, I, N, D, or H |
| A42 | R or D |
| K44 | R or E |
| K45 | A, E, or R |
| L54 | M |
| P62 | H, G, N, T, S, F, I, D, or E |
| H64 | F, Y, S, I, T, or N |
| Q69 | H |
| R78 | K |
| D80 | P |
| P89 | S, T, Y, L, F, A, P, V, I, N, D, H, or M |
| A93 | E or K |
| G107 | D |
| Q108 | H |
| Q112 | E, R, or K |
| C125 | Y, F, or L |
| Q126 | E, F, H, I, L, or Y |
| A150 | V |
| T156 | R, N, D, C, G, H, I, L, F, S, Y, V, A, P, or T |
| F157 | R, N, D, C, G, H, I, L, F, S, Y, V, A, or P |
| A158 | R, N, D, C, G, H, I, L, F, S, Y, V, A, P, or T |
| V159 | R, N, D, C, G, H, I, L, F, S, Y, V, A, or P |
| G160 | R, N, D, C, G, H, I, L, F, S, Y, V, A, P, or T |
| P161 | R, N, D, C, G, H, I, L, F, S, Y, V, A, or P |
| G162 | R, N, D, C, G, H, I, L, F, S, Y, V, A, P, or T |
| H163 | R, N, D, C, G, H, I, L, F, S, Y, V, A, or P |
| C164 | R, N, D, C, G, H, I, L, F, S, Y, V, A, P, or T |
| L165 | R, N, D, C, G, H, I, L, F, S, Y, V, A, or P |
| R170 | P |
| A171 | G |
| V176 | R, N, D, C, G, H, I, L, F, S, Y, V, P, or A |
| P177 | S, T, Y, L, F, A, P, V, I, N, D, or H |
| A178 | S, T, Y, L, F, A, P, V, I, N, D, or H |
| L184 | S, N, R, K, T, G, D, E, A, F, H, I, L, P, V, or Y |
| H185 | S, N, R, K, T, G, D, E, or A |
| P186 | S, N, R, K, T, G, D, E, A, F, H, I, L, P, V, or Y |
| I187 | S, N, R, K, T, G, D, E, or A |
| Q188 | P, S, N, R, K, T, G, D, E, or A |
| R189 | P |
| P190 | F, M, A, D, G, H, N, P, R, S, or T |
| I191 | M, A, D, F, H, I, L, N, P, S, T, V, Y, E, G, K, or R |
| A194 | S, T, Y, L, F, A, P, V, I, N, D, or H |
| A213 | C, N, S, or T |
| L217 | R, N, D, C, G, H, I, L, F, S, Y, or V |
| C219 | R, N, D, C, G, H, I, L, F, S, Y, or V |
| A222 | D |
| E225 | P or C |
| H239 | P |
| L240 | D, N, or Y |
| R241 | A, D, L, Q, or Y |
| A242 | C, F, G, H, I, K, L, M, N, Q, R, S, V, W, or Y |
| V244 | I or P |
| T249 | A |
| D251 | G |
| E257 | P |
| S258 | C |
| L260 | D, F, Q, or T |
| V265 | F |
| Q270 | S, T, A, H, P, or F |
| G271 | S, N, R, K, T, G, D, E, or A |
| C272 | S, N, R, K, T, G, D, E, A, C, H, Y, F, H, L, P, or V |
| A290 | C |
| W292 | R |
| S301 | A, D, E, F, G, H, I, K, L, M, N, P, Q, T, V, W, Y, |
| | C, or R |
| W302 | A, D, E, F, G, H, I, L, M, N, P, Q, R, S, T, V, Y, |
| | or K |
| E319 | D |
| V325 | F, Y, S, I, T, N, A, D, H, L, P, or V |
| L326 | F, Y, S, I, T, N, A, D, H, L, P, or V |
| L327 | F, Y, S, I, T, N, A, D, H, L, P, or V |
| C332 | A, D, G, H, N, P, R, S, or T |
| Y359 | A or S |
| V363 | R, S, T, Y, L, F, A, P, V, I, N, D, or H |
| L365 | K, Q, F, Y, S, I, T, N, A, D, H, L, P, or V |

[0129] For example, in certain embodiments, the recombinant mutant human sialidase comprises: (a) a substitution of a proline residue at a position corresponding to position 5 of wild-type human Neu2 (P5); (b) a substitution of a lysine residue at a position corresponding to position 9 of wild-type human Neu2 (K9); (c) a substitution of an alanine residue at a position corresponding to position 42 of wild-type human Neu2 (A42); (d) a substitution of a lysine residue at a position corresponding to position 44 of wild-type human Neu2 (K44); (e) a substitution of a lysine residue at a position corresponding to position 45 of wild-type human Neu2 (K45); (f) a substitution of a leucine residue at a position corresponding to position 54 of wild-type human Neu2 (L54); (g) a substitution of a proline residue at a position corresponding to position 62 of wild-type human Neu2 (P62); (h) a substitution of a glutamine residue at a position corresponding to position 69 of wild-type human Neu2 (Q69); (i) a substitution of an arginine residue at a position corresponding to position 78 of wild-type human Neu2 (R78); (j) a substitution of an aspartic acid residue at a position corresponding to position 80 of wild-type human Neu2 (D80); (k) a substitution of an alanine residue at a position corresponding to position 93 of wild-type human Neu2 (A93); (l) a substitution of a glycine residue at a position corresponding to position 107 of wild-type human Neu2 (G107); (m) a substitution of a glutamine residue at a position corresponding to position 108 of wild-type human Neu2 (Q108); (n) a substitution of a glutamine residue at a position corresponding to position 112 of wild-type human Neu2 (Q112); (o) a substitution of a cysteine residue at a position corresponding to position 125 of wild-type human Neu2 (C125); (p) a substitution of a glutamine residue at a position corresponding to position 126 of wild-type human Neu2 (Q126); (q) a substitution of an alanine residue at a position corresponding to position 150 of wild-type human Neu2 (A150); (r) a substitution of a cysteine residue at a position corresponding to position 164 of wild-type human Neu2 (C164); (s) a substitution of an arginine residue at a position corresponding to position 170 of wild-type human Neu2 (R170); (t) a substitution of an alanine residue at a position corresponding to position 171 of wild-type human Neu2 (A171); (u) a substitution of a glutamine residue at a position corresponding to position 188 of wild-type human Neu2 (Q188); (v) a substitution of an arginine residue at a position corresponding to position 189 of wild-type human Neu2 (R189); (w) a substitution of an alanine residue at a position corresponding to position 213 of wild-type human Neu2 (A213); (x) a substitution of a leucine residue at a position corresponding to position 217 of wild-type human Neu2 (L217); (y) a substitution of a glutamic acid residue at a position corresponding to position 225 of wild-type human Neu2 (E225); (z) a substitution of a histidine residue at a position corresponding to position 239 of wild-type human Neu2 (H239); (aa) a substitution of a leucine residue at a position corresponding to position 240 of wild-type human Neu2 (L240); (bb) a substitution of an arginine residue at a position corresponding to position 241 of wild-type human Neu2 (R241); (cc) a substitution of an alanine residue at a position corresponding to position 242 of wild-type human Neu2 (A242); (dd) a substitution of a valine residue at a position corresponding to position 244 of wild-type human Neu2 (V244); (ee) a substitution of a threonine residue at a position corresponding to position 249 of wild-type human Neu2 (T249); (ff) a substitution of an aspartic acid residue at a position corresponding to position 251 of wild-type human Neu2 (D251); (gg) a substitution of a glutamic acid residue at a position corresponding to position 257 of wild-type human Neu2 (E257); (hh) a substitution of a serine residue at a position corresponding to position 258 of wild-type human Neu2 (S258); (ii) a substitution of a leucine residue at a position corresponding to position 260 of wild-type human Neu2 (L260); (jj) a substitution of a valine residue at a position corresponding to position 265 of wild-type human Neu2 (V265); (kk) a substitution of a glutamine residue at a position corresponding to position 270 of wild-type human Neu2 (Q270); (ll) a substitution of an alanine residue at a position corresponding to position 290 of wild-type human Neu2 (A290); (mm) a substitution of a tryptophan residue at a position corresponding to position 292 of wild-type human Neu2 (W292); (nn) a substitution of a serine residue at a position corresponding to position 301 of wild-type human Neu2 (S301); (oo) a substitution of a tryptophan residue at a position corresponding to position 302 of wild-type human Neu2 (W302); (pp) a substitution of a valine residue at a position corresponding to position 363 of wild-type human Neu2 (V363); or (qq) a substitution of a leucine residue at a position corresponding to position 365 of wild-type human Neu2 (L365); or a combination of any of the foregoing substitutions. For example, the sialidase may comprise a substitution of K9, A42, P62, A93, Q216, A242, Q270, S301, W302, V363, or L365, or a combination of any of the foregoing substitutions.

[0130] In certain embodiments, in the sialidase: (a) the proline residue at a position corresponding to position 5 of wild-type human Neu2 is substituted by histidine (P5H); (b) the lysine residue at a position corresponding to position 9 of wild-type human Neu2 is substituted by aspartic acid (K9D); (c) the alanine residue at a position corresponding to position 42 of wild-type human Neu2 is substituted by a positively charged amino acid, e.g., arginine (A42R) or lysine (A42K), or is substituted by aspartic acid (A42D); (d) the lysine residue at a position corresponding to position 44 of wild-type human Neu2 is substituted by arginine (K44R) or glutamic acid (K44E); (e) the lysine residue at a position corresponding to position 45 of wild-type human Neu2 is substituted by alanine (K45A), arginine (K45R), or glutamic acid (K45E); (f) the leucine residue at a position corresponding to position 54 of wild-type human Neu2 is substituted by methionine (L54M); (g) the proline residue at a position corresponding to position 62 of wild-type human Neu2 is substituted by asparagine (P62N), aspartic acid (P62D), histidine (P62H), glutamic acid (P62E), glycine (P62G), serine (P62S), or threonine (P62T); (h) the glutamine residue at a position corresponding to position 69 of wild-type human Neu2 is substituted by histidine (Q69H); (i) the arginine residue at a position corresponding to position 78 of wild-type human Neu2 is substituted by lysine (R78K); (j) the aspartic acid residue at a position corresponding to position 80 of wild-type human Neu2 is substituted by proline (D80P); (k) the alanine residue at a position corresponding to position 93 of wild-type human Neu2 is substituted by a negatively charged amino acid, e.g., aspartic acid (A93D) or glutamic acid (A93E), or is substituted by lysine (A93K); (l) the glycine residue at a position corresponding to position 107 of wild-type human Neu2 is substituted by aspartic acid (G107D); (m) the glutamine residue at a position corresponding to position 108 of wild-type human Neu2 is substituted by histidine (Q108H); (n) the glutamine residue at a position corresponding to position 112 of wild-type human Neu2 is substituted by glutamic acid (Q112E), arginine (Q112R), or lysine (Q112K); (o) the cysteine residue at a position corresponding to position 125 of wild-type human Neu2 is substituted by leucine (C125L); (p) the glutamine residue at a position corresponding to position 126 of wild-type human Neu2 is substituted by an aromatic amino acid, e.g., phenylalanine (Q126F), tyrosine (Q126Y), or tryptophan (Q126W), or is substituted by leucine (Q126L), glutamic acid (Q126E), histidine (Q126H), or isoleucine (Q126I); (q) the alanine residue at a position corresponding to position 150 of wild-type human Neu2 is substituted by valine (A150V); (r) the cysteine residue at a position corresponding to position 164 of wild-type human Neu2 is substituted by glycine (C164G); (s) the arginine residue at a position corresponding to position 170 of wild-type human Neu2 is substituted by proline (R170P); (t) the alanine residue at a position corresponding to position 171 of wild-type human Neu2 is substituted by glycine (A171G); (u) the glutamine residue at a position corresponding to position 188 of wild-type human Neu2 is substituted by proline (Q188P); (v) the arginine residue at a position corresponding to position 189 of wild-type human Neu2 is substituted by proline (R189P); (w) the alanine residue at a position corresponding to position 213 of wild-type human Neu2 is substituted by cysteine (A213C), asparagine (A213N), serine (A213S), or threonine (A213T); (x) the leucine residue at a position corresponding to position 217 of wild-type human Neu2 is substituted by alanine (L217A) or valine (L217V); (y) the threonine residue at a position corresponding to position 249 of wild-type human Neu2 is substituted by alanine (T249A); (z) the aspartic acid residue at a position corresponding to position 251 of wild-type human Neu2 is substituted by glycine (D251G); (aa) the glutamic acid residue at a position corresponding to position 225 of wild-type human Neu2 is substituted by cysteine (E225C) or proline (E225P); (bb) the histidine residue at a position corresponding to position 239 of wild-type human Neu2 is substituted by proline (H239P); (cc) the leucine residue at a position corresponding to position 240 of wild-type human Neu2 is substituted by aspartic acid (L240D), asparagine (L240N), or tyrosine (L240Y); (dd) the arginine residue at a position corresponding to position 241 of wild-type human Neu2 is substituted by alanine (R241A), aspartic acid (R241D), leucine (R241L), glutamine (R241Q). or tyrosine (R241Y); (ee) the alanine residue at a position corresponding to position 242 of wild-type human Neu2 is substituted by cysteine (A242C), phenylalanine (A242F), glycine (A242G), histidine (A242H), isoleucine (A242I), lysine (A242K), leucine (A242L), methionine (A242M), asparagine (A242N), glutamine (A242Q), arginine (A242R), serine (A242S), valine (A242V), tryptophan (A242W), or tyrosine (A242Y); (ff) the valine residue at a position corresponding to position 244 of wild-type human Neu2 is substituted by isoleucine (V244I), lysine (V244K), or proline (V244P); (gg) the glutamic acid residue at a position corresponding to position 257 of wild-type human Neu2 is substituted by proline (E257P); (hh) the serine residue at a position corresponding to position 258 is substituted by cysteine (S258C); (ii) the leucine residue at a position corresponding to position 260 of wild-type human Neu2 is substituted by aspartic acid (L260D), phenylalanine (L260F), glutamine (L260Q), or threonine (L260T); (jj) the valine residue at a position corresponding to position 265 of wild-type human Neu2 is substituted by phenylalanine (V265F); (kk) the glutamine residue at a position corresponding to position 270 of wild-type human Neu2 is substituted by a polar, uncharged amino acid, e.g., serine (Q270S) or threonine (Q270T), or is substituted by alanine (Q270A), histidine (Q270H), phenylalanine (Q270F), or proline (Q270P); (ll) the alanine residue at a position corresponding to position 290 of wild-type human Neu2 is substituted by cysteine (A290C); (mm) the tryptophan residue at a position corresponding to position 292 of wild-type human Neu2 is substituted by arginine (W292R); (nn) the serine residue at a position corresponding to position 301 of wild-type human Neu2 is substituted by alanine (S301A), aspartic acid (S301D), glutamic acid (S301E), phenylalanine (S301F), histidine (S301H), lysine (S301K), leucine (S301L), methionine (S301M), asparagine (S301N), proline (S301P), glutamine (S301Q), arginine (S301R), threonine (S301T), valine (S301V), tryptophan (S301W), or tyrosine (S301Y)); (oo) the tryptophan residue at a position corresponding to position 302 of wild-type human Neu2 is substituted by alanine (W302A), aspartic acid (W302D), phenylalanine (W302F), glycine (W302G), histidine (W302H), isoleucine (W302I), lysine (W302K), leucine (W302L), methionine (W302M), asparagine (W302N), proline (W302P), glutamine (W302Q), arginine (W302R), serine (W302S), threonine (W302T), valine (W302V), or tyrosine (W302Y); (pp) the valine residue at a position corresponding to position 363 of wild-type human Neu2 is substituted by arginine (V363R); or (qq) the leucine residue at a position corresponding to position 365 of wild-type human Neu2 is substituted by glutamine (L365Q), histidine (L365H), isoleucine (L365I), lysine (L365K) or serine (L365S); or the sialidase comprises a combination of any of the foregoing substitutions. For example, the sialidase may comprise a substitution selected from K9D, A42R, P62G, P62N, P62S, P62T, A93E, Q126Y, A242F, A242W, A242Y, Q270A, Q270T, S301A, S301R, W302K, W302R, V363R, and L365I, or a combination of any of the foregoing substitutions.

[0131] In certain embodiments, the recombinant mutant human sialidase comprises a deletion of a leucine residue at a position corresponding to position 184 of wild-type human Neu2 (ΔL184), a deletion of a histidine residue at a position corresponding to position 185 of wild-type human Neu2 (ΔH185), a deletion of a proline residue at a position corresponding to position 186 of wild-type human Neu2 (ΔP186), a deletion of an isoleucine residue at a position corresponding to position 187 of wild-type human Neu2 (ΔI187), and a deletion of a glutamine residue at a position corresponding to position 184 of wild-type human Neu2 (ΔQ188), or a combination of any of the foregoing deletions.

[0132] In certain embodiments, the recombinant mutant human sialidase comprises an insertion between a threonine residue at a position corresponding to position 216 of wild-type human Neu2 and a leucine residue at a position corresponding to position 217 of wild-type human Neu2, for example, an insertion of an amino acid selected from S, T, Y, L, F, A, P, V, I, N, D, and H.

[0133] Additional exemplary sialidase mutations, and combinations of sialidase mutations, are described in International (PCT) Patent Application Publication No. WO 2019/136167, including in the Detailed Description in the section entitled “I. Recombinant Human Sialidases,” and in the Examples in Examples 1, 2, 3, 4, 5, and 6, and International (PCT) Patent Application Publication No. WO 2021/003469, including in the Detailed Description in the section entitled “I. Recombinant Human Sialidases,” and in the Examples in Examples 2, 3, 4, and 5.

[0134] f. Combinations of Substitutions

[0135] The invention further provides a recombinant mutant human sialidase comprising a combination of any of the mutations contemplated herein. For example, the recombinant mutant sialidase enzyme may comprise a combination of 2, 3, 4, 5, 6, 7, 8, 9, 10, 11, 12, 13, 14, 15 or more of the mutations contemplated herein. It is contemplated that the recombinant mutant sialidase enzyme may comprise 1-15, 1-10, 1-7, 1-6, 1-5, 1-4, 1-3, 1-2, 2-15, 2-10, 2-7, 2-6, 2-5, 2-4, 2-3, 3-15, 3-10, 3-7, 3-6, 3-5, or 3-4 of the mutations contemplated herein.

[0136] For example, alternatively or in addition to the modifications to decrease sensitivity to protease (e.g., trypsin) degradation, the recombinant mutant sialidase enzyme may comprise one or more of the following modifications described herein.

[0137] In certain embodiments, the recombinant mutant sialidase enzyme further comprises an M1 deletion (ΔM1), M1A substitution, M1D substitution, V6Y substitution, K9D substitution, P62G substitution, P62N substitution, P62S substitution, P62T substitution, A93E substitution, I187K substitution, Q270A substitution, S301R substitution, W302K substitution, C332A substitution, V363R substitution, L365I substitution, or a combination of any of the foregoing.

[0138] In certain embodiments, the recombinant mutant sialidase enzyme further comprises a M1 deletion (ΔM1), M1A substitution, M1D substitution, V6Y substitution, I187K substitution, C332A substitution, or a combination of any of the foregoing. For example, the recombinant mutant sialidase enzyme may comprise a combination of mutations selected from: M1A and V6Y; M1A and I187K; M1A and C332A; M1D and V6Y; M1D and I187K; M1D and C332A; ΔM1 and V6Y; ΔM1 and I187K; ΔM1 and C332A; V6Y and I187K; V6Y and C332A; I187K and C332A; M1A, V6Y, and I187K; M1A, V6Y, and C332A; M1A, I187K, and C332A; M1D, V6Y, and I187K; M1D, V6Y, and C332A; M1D, I187K, and C332A; ΔM1, V6Y, and I187K; ΔM1, V6Y, and C332A; ΔM1, I187K, and C332A; V6Y, I187K, and C332A; M1A, V6Y, I187K, and C332A; M1D, V6Y, I187K, and C332A; and ΔM1, V6Y, I187K, and C332A.

[0139] In certain embodiments, the recombinant mutant sialidase enzyme further comprises (i) an amino acid substitution identified in TABLE 7, or a combination of any amino acid substitutions identified in TABLE 7, and (ii) an M1 deletion (ΔM1), M1A substitution, M1D substitution, V6Y substitution, I187K substitution, C332A substitution, or a combination of any of the foregoing. For example, the recombinant mutant sialidase enzyme may comprise (i) an amino acid substitution identified in TABLE 7, or a combination of any amino acid substitutions identified in TABLE 7, and (ii) a combination of mutations selected from: M1A and V6Y; M1A and I187K; M1A and C332A; M1D and V6Y; M1D and I187K; M1D and C332A; ΔM1 and V6Y; ΔM1 and I187K; ΔM1 and C332A; V6Y and I187K; V6Y and C332A; I187K and C332A; M1A, V6Y, and I187K; M1A, V6Y, and C332A; M1A, I187K, and C332A; M1D, V6Y, and I187K; M1D, V6Y, and C332A; M1D, I187K, and C332A; ΔM1, V6Y, and I187K; ΔM1, V6Y, and C332A; ΔM1, I187K, and C332A; V6Y, I187K, and C332A; M1A, V6Y, I187K, and C332A; M1D, V6Y, I187K, and C332A; and ΔM1, V6Y, I187K, and C332A.

[0140] In certain embodiments, the recombinant mutant sialidase enzyme comprises: (a) the M1D, V6Y, P62G, A93E, I187K, and C332A substitutions; (b) the M1D, V6Y, K9D, A93E, I187K, C332A, V363R, and L365I substitutions; (c) the M1D, V6Y, P62N, I187K, and C332A substitutions; (d) the M1D, V6Y, I187K, Q270A, S301R, W302K, and C332A substitutions; (e) the M1D, V6Y, P62S, I187K, Q270A, S301R, W302K, and C332A substitutions; (f) the M1D, V6Y, P62T, I187K, Q270A, S301R, W302K, and C332A substitutions; (g) the M1D, V6Y, P62N, I187K, Q270A, S301R, W302K, and C332A substitutions; (h) the M1D, V6Y, P62G, A93E, I187K, S301A, W302R, and C332A substitutions; (i) the M1D, V6Y, P62G, A93E, Q126Y, I187K, Q270T, and C332A substitutions; (j) the M1D, V6Y, P62G, A93E, Q126Y, I187K, and C332A substitutions; (k) the M1D, V6Y, P62G, A93E, Q126Y, I187K, A242F, Q270T, and C332A substitutions; (l) the M1D, V6Y, A42R, P62G, A93E, Q126Y, I187K, A242F, Q270T, and C332A substitutions; (m) the M1D, V6Y, P62G, A93E, Q112E, Q126Y, I187K, Q270T, A242F, and C332A; or (n) the M1D, V6Y, P62G, A93E, Q126Y, I187K, E225C, Q270T, A290C, A242F, C332A substitutions.

[0141] In certain embodiments, the recombinant mutant human sialidase further comprises a substitution of a serine residue at a position corresponding to position 301 of wild-type human Neu2 (S301) in combination with a substitution of a tryptophan residue at a position corresponding to position 302 of wild-type human Neu2 (W302). For example, the recombinant mutant human sialidase may comprise a combination of substitutions corresponding to a combination of substitutions listed in a row of TABLE 8 (amino acid positions corresponding to wild-type human Neu2 (SEQ ID NO: 1)). For example, the recombinant mutant human sialidase may comprise: the S301K and W302R substitutions; the S301K and W302K substitutions; or the S301A and W302S substitutions.

TABLE 8
Substitutions

S301A, W302R
S301A, W302S
S301A, W302T
S301K, W302S
S301N, W302S
S301T, W302S
S301T, W302T
S301T, W302R
S301A, W302A
S301K, W302R
S301K, W302T
S301N, W302T
S301K, W302K
S301P, W302R
S301P, W302S
S301P, W302T

[0142] In certain embodiments, the recombinant mutant human sialidase further comprises a combination of substitutions corresponding to a combination of substitutions listed in a row of TABLE 9 (amino acid positions corresponding to wild-type human Neu2 (SEQ ID NO: 1)).

TABLE 9
Substitutions

M1D, V6Y, P62G, I187K, C332A
M1D, V6Y, K9D, I187K, C332A, V363R, L365I
M1D, V6Y, P62G, A93E, I187K, C332A
M1D, V6Y, K9D, I187K, C332A, V363R, L365K
M1D, V6Y, K9D, I187K, C332A, V363R, L365S
M1D, V6Y, K9D, I187K, C332A, V363R, L365Q
M1D, V6Y, K9D, I187K, C332A, V363R, L365H
M1D, V6Y, A93K, I187K, C332A
M1D, V6Y, A93E, I187K, C332A
V6Y, I187K, W292R
V6Y, G107D, I187K
V6Y, C125L
C125L, I187K
V6Y, C125L, I187K
M1D, V6Y, K45A, I187K, C332A
M1D, V6Y, Q270A, I187K, C332A
M1D, V6Y, K44R, K45R, I187K, C332A
M1D, V6Y, Q112R, I187K, C332A
M1D, V6Y, Q270F, I187K, C332A
M1D, V6Y, I187K, S301R, W302K, C332A
M1D, V6Y, K44E, K45E, I187K, C332A
M1D, V6Y, I187K, L217V, C332A
M1D, V6Y, I187K, L217A, C332A
M1D, V6Y, K44E, K45E, I187K, S301R, W302K, C332A
M1D, V6Y, Q112R, I187K, S301R, W302K, C332A
M1D, V6Y, I187K, Q270A, S301R, W302K, C332A
M1D, V6Y, K44E, K45E, Q112R, I187K, C332A
M1D, V6Y, K44E, K45E, I187K, Q270A, C332A
M1D, V6Y, K45A, I187K, Q270A, C332A
M1D, V6Y, I187K, Q270H, C332A
M1D, V6Y, I187K, Q270P, C332A
M1D, V6Y, Q112K, I187K, C332A
M1D, V6Y, P62S, I187K, Q270A, S301R, W302K, C332A
M1D, V6Y, P62T, I187K, Q270A, S301R, W302K, C332A
M1D, V6Y, P62N, I187K, Q270A, S301R, W302K, C332A
V6Y, P62H, I187K
V6Y, Q108H, I187K
M1D, V6Y, P62H, I187K, C332A
M1D, V6Y, P62G, I187K, C332A
V6Y, P62G, I187K
M1D, V6Y, P62H, I187K
M1D, V6Y, Q108H, I187K
M1D, V6Y, P62N, I187K, C332A
M1D, V6Y, P62D, I187K, C332A
M1D, V6Y, P62E, I187K, C332A
V6Y, C164G, I187K, T249A
V6Y, C164G, I187K
V6Y, Q126L, I187K D251G
V6Y, L54M, Q69H, R78K, A171G, I187K
V6Y, P62T, I187K
V6Y, A150V, I187K
P5H, V6Y, P62S, I187K
V6Y, C164G, I187K
Q126Y, Q170T
Q126Y, A242F, Q270T
M1D, V6Y, P62G, A93E, Q126E, I187K, C332A
M1D, V6Y, P62G, A93E, Q126I, I187K, C332A
M1D, V6Y, P62G, A93E, Q126L, I187K, C332A
M1D, V6Y, P62G, A93E, Q126Y, I187K, C332A
M1D, V6Y, P62G, A93E, Q126F, I187K, C332A
M1D, V6Y, P62G, A93E, Q126H, I187K, C332A
M1D, V6Y, P62G, A93E, I187K, Q270S, C332A
M1D, V6Y, P62G, A93E, I187K, Q270T, C332A
M1D, V6Y, P62G, A93E, Q126Y, I187K, Q270T, C332A
M1D, V6Y, P62G, A93E, Q126Y, I187K, A242F, Q270T, C332A
M1D, V6Y, P62G, D80P, A93E, I187K, C332A
M1D, V6Y, P62G, A93E, R170P, I187K, C332A
M1D, V6Y, P62G, A93E, I187K, Q188P, C332A
M1D, V6Y, P62G, A93E, I187K, R189P, C332A
M1D, V6Y, P62G, A93E, I187K, E225P, C332A
M1D, V6Y, P62G, A93E, I187K, H239P, C332A
M1D, V6Y, P62G, A93E, I187K, E257P, C332A
M1D, V6Y, P62G, A93E, I187K, S301A, C332A
M1D, V6Y, P62G, A93E, I187K, S301D, C332A
M1D, V6Y, P62G, A93E, I187K, S301E, C332A
M1D, V6Y, P62G, A93E, I187K, S301F, C332A
M1D, V6Y, P62G, A93E, I187K, S301H, C332A
M1D, V6Y, P62G, A93E, I187K, S301K, C332A
M1D, V6Y, P62G, A93E, I187K, S301L, C332A
M1D, V6Y, P62G, A93E, I187K, S301M, C332A
M1D, V6Y, P62G, A93E, I187K, S301N, C332A
M1D, V6Y, P62G, A93E, I187K, S301P, C332A
M1D, V6Y, P62G, A93E, I187K, S301Q, C332A
M1D, V6Y, P62G, A93E, I187K, S301R, C332A
M1D, V6Y, P62G, A93E, I187K, S301T, C332A
M1D, V6Y, P62G, A93E, I187K, S301V, C332A
M1D, V6Y, P62G, A93E, I187K, S301W, C332A
M1D, V6Y, P62G, A93E, I187K, S301Y, C332A
M1D, V6Y, P62G, A93E, I187K, W302A, C332A
M1D, V6Y, P62G, A93E, I187K, W302D, C332A
M1D, V6Y, P62G, A93E, I187K, W302F, C332A
M1D, V6Y, P62G, A93E, I187K, W302G, C332A
M1D, V6Y, P62G, A93E, I187K, W302H, C332A
M1D, V6Y, P62G, A93E, I187K, W302I, C332A
M1D, V6Y, P62G, A93E, I187K, W302L, C332A
M1D, V6Y, P62G, A93E, I187K, W302M, C332A
M1D, V6Y, P62G, A93E, I187K, W302N, C332A
M1D, V6Y, P62G, A93E, I187K, W302P, C332A
M1D, V6Y, P62G, A93E, I187K, W302Q, C332A
M1D, V6Y, P62G, A93E, I187K, W302R, C332A
M1D, V6Y, P62G, A93E, I187K, W302S, C332A
M1D, V6Y, P62G, A93E, I187K, W302T, C332A
M1D, V6Y, P62G, A93E, I187K, W302V, C332A
M1D, V6Y, P62G, A93E, I187K, W302Y, C332A
M1D, V6Y, P62G, A93E, I187K, S301A, W302A, C332A
M1D, V6Y, P62G, A93E, I187K, S301A, W302R, C332A
M1D, V6Y, P62G, A93E, I187K, S301A, W302S, C332A
M1D, V6Y, P62G, A93E, I187K, S301A, W302T, C332A
M1D, V6Y, P62G, A93E, I187K, S301K, W302S, C332A
M1D, V6Y, P62G, A93E, I187K, S301K, W302R, C332A
M1D, V6Y, P62G, A93E, I187K, S301K, W302T, C332A
M1D, V6Y, P62G, A93E, I187K, S301N, W302S, C332A
M1D, V6Y, P62G, A93E, I187K, S301N, W302T, C332A
M1D, V6Y, P62G, A93E, I187K, S301T, W302R, C332A
Q126Y, Q270T
Q126Y, A242F, Q270T
M1D, V6Y, A42R, P62G, A93E, Q126Y, I187K, A242F, Q270T, C332A
M1D, V6Y, P62G, A93E, Q112E, Q126Y, I187K, Q270T, A242F, C332A
M1D, V6Y, P62G, A93E, Q126Y, I187K, E225C, Q270T, A290C, A242F, C332A
V6Y, A42R, P62G, A93E, Q126Y, I187K, Q270T, A242F, C332A
M1D, A42R, P62G, A93E, Q126Y, I187K, Q270T, A242F, C332A
M1D, V6Y, P62G, A93E, Q126Y, I187K, Q270T, A242F, C332A
M1D, V6Y, A42R, A93E, Q126Y, I187K, Q270T, A242F, C332A
M1D, V6Y, A42R, P62G, Q126Y, I187K, Q270T, A242F, C332A
M1D, V6Y, A42R, P62G, A93E, I187K, Q270T, A242F, C332A
M1D, V6Y, A42R, P62G, A93E, Q126Y, Q270T, A242F, C332A
M1D, V6Y, A42R, P62G, A93E, Q126Y, I187K, Q270T, C332A
M1D, V6Y, A42R, P62G, A93E, Q126Y, I187K, A242F, C332A
M1D, V6Y, A42R, P62G, A93E, Q126Y, I187K, Q270T, A242F

[0143] In certain embodiments, the sialidase comprises a substitution of M1, A42, and Q270, or a combination of any of the foregoing substitutions. These substitutions were found to, for example, improve the activity of the enzyme (see, Example 11). In certain embodiments, the sialidase comprises a substitution at each of M1, A42, and Q270. In certain embodiments, the sialidase comprises a substitution selected from M1D, A42R, and Q270T, or a combination of any of the foregoing substitutions. In certain embodiments, the sialidase comprises each of the M1D, A42R, and Q270T substitutions.

[0144] In certain embodiments, the sialidase comprises a substitution of V6, P62, A93, Q126, and I187, or a combination of any of the foregoing substitutions. These substitutions were found to, for example, improve the expression/yield of the enzyme (see, Example 11). In certain embodiments, the sialidase comprises a substitution at each of V6, P62, A93, Q126, and I187. In certain embodiments, the sialidase comprises a substitution selected from V6Y, P62G, A93E, Q126Y, and I187K, or a combination of any of the foregoing substitutions. In certain embodiments, the sialidase comprises each of the V6Y, P62G, A93E, Q126Y, and I187K substitutions.

[0145] In certain embodiments, the sialidase comprises a substitution of M1, A42, A242, and Q270, or a combination of any of the foregoing substitutions. These substitutions were found to, for example, improve the stability of the enzyme (see, Example 11). In certain embodiments, the sialidase comprises a substitution at each of M1, A42, A242, and Q270. In certain embodiments, the sialidase comprises a substitution selected from M1D, A42R, A242F, and Q270T, or a combination of any of the foregoing substitutions. In certain embodiments, the sialidase comprises each of the M1D, A42R, A242F, and Q270T substitutions.

[0146] In certain embodiments, the recombinant mutant sialidase enzyme comprises: (a) the V6Y, A42R, P62G, A93E, Q126Y, I187K, Q270T, A242F, and C332A substitutions; (b) the ΔM1 deletion and the V6Y, A42R, P62G, A93E, Q126Y, I187K, Q270T, A242F, and C332A substitutions; (c) the M1D, A42R, P62G, A93E, Q126Y, I187K, Q270T, A242F, and C332A substitutions; (d) the M1D, V6Y, P62G, A93E, Q126Y, I187K, Q270T, A242F, and C332A substitutions; (e) the M1D, V6Y, A42R, A93E, Q126Y, I187K, Q270T, A242F, and C332A substitutions; (f) the M1D, V6Y, A42R, P62G, Q126Y, I187K, Q270T, A242F, and C332A substitutions; (g) the M1D, V6Y, A42R, P62G, A93E, I187K, Q270T, A242F, and C332A substitutions; (h) the M1D, V6Y, A42R, P62G, A93E, Q126Y, Q270T, A242F, and C332A substitutions; (i) the M1D, V6Y, A42R, P62G, A93E, Q126Y, I187K, Q270T, and C332A substitutions; (j) the M1D, V6Y, A42R, P62G, A93E, Q126Y, I187K, A242F, and C332A substitutions; or (k) the M1D, V6Y, A42R, P62G, A93E, Q126Y, I187K, Q270T, and A242F substitutions.

[0147] In certain embodiments, the sialidase comprises a substitution of M1, V6, A42, P62, A93, Q126, I187, A242, Q270, C332A, or a combination of any of the foregoing substitutions. In certain embodiments, the sialidase comprises a substitution at each of M1, V6, A42, P62, A93, Q126, I187, A242, Q270, and C332. In certain embodiments, the sialidase comprises a substitution selected from M1D, V6Y, A42R, P62G, A93E, Q126Y, I187K, A242F, Q270T, and C332A, or a combination of any of the foregoing substitutions. In certain embodiments, the sialidase comprises each of the M1D, V6Y, A42R, P62G, A93E, Q126Y, I187K, A242F, Q270T, and C332A substitutions.

[0148] In certain embodiments, the recombinant mutant human sialidase comprises the amino acid sequence of any one of SEQ ID NOs: 48-54, 149, 154, 159, 191, or 198, or an amino acid sequence that has at least 85%, 90%, 95%, 96%, 97%, 98%, or 99% sequence identity to any one of SEQ ID NOs: 48-54, 149, 154, 159, 191, or 198. In certain embodiments, the recombinant mutant human sialidase is then modified, or has been modified, to include one or more modifications to decrease protease sensitivity.

[0149] In certain embodiments, the recombinant mutant human sialidase comprises the amino acid sequence of

(SEQ ID NO: 199)
X₁X₂SX₃X₄X₅LQX₆ESVFQSGAHAYRIPALLYLPGQQSLLAFAEQRX₇S
X₈X₉DEHAELIVX₁₀RRGDYDAX₁₁THQVQWX₁₂AQEVVAQAX₁₃LX₁₄GHR
SMNPCPLYDX₁₅QTGTLFLFFIAIPX₁₆X₁₇VTEX₁₈QQLQTRANVTRLX₁₉
X₂₀VTSTDHGRTWSSPRDLTDAAIGPX₂₁YREWSTFAVGPGHX₂₂LQLHD
X₂₃X₂₄RSLVVPAYAYRKLHPX₂₅X₂₆X₂₇PIPSAFX₂₈FLSHDHGRTWARG
HFVX₂₉QDTX₃₀ECQVAEVX₃₁TGEQRVVTLNARSX₃₂X₃₃X₃₄X₃₅RX₃₆QA
QSX₃₇NX₃₈GLDFQX₃₉X₄₀QX₄₁VKKLX₄₂EPPPX₄₃GX₄₄QGSVISFPSPR
SGPGSPAQX₄₅LLYTHPTHX₄₆X₄₇QRADLGAYLNPRPPAPEAWSEPX₄₈L
LAKGSX₄₉AYSDLQSMGTGPDGSPLFGX₅₀LYEANDYEEIX₅₁FX₅₂MFTL
KQAFPAEYLPQ,

wherein X₁ is Ala, Arg, Asn, Asp, Gln, Glu, Gly, His, Leu, Lys, Met, Phe, Thr, Val, or not present, X₂ is Ala or Lys, X₃ is Asn or Leu, X₄ is Pro or His, X₅ is Phe, Trp, Tyr or Val, X₆ is Lys or Asp, X₇ is Ala or Arg, X₈ is Lys, Arg, or Glu, X₉ is Lys, Ala, Arg, or Glu, X₁₀ is Leu or Met, X₁₁ is Pro, Asn, Asp, His, Glu, Gly, Ser or Thr, X₁₂ is Gln or His, X₁₃ is Arg or Lys, X₁₄ is Asp or Pro, X₁₅ is Ala, Glu or Lys, X₁₆ is Gly or Asp, X₁₇ is Gln or His, X₁₈ is Gln, Arg, or Lys, X₁₉ is Ala, Cys, Ile, Ser, Val, or Leu, X₂₀ is Gln, Leu, Glu, Phe, His, Ile, Leu, or Tyr, X₂₁ is Ala or Val, X₂₂ is Cys or Gly, X₂₃ is Arg or Pro, X₂₄ is Ala or Gly, X₂s is Arg, Ile, or Lys, X₂₆ is Gln or Pro, X₂₇ is Arg or Pro, X₂₈ is Ala, Cys, Leu, or Val, X₂₉ is Ala, Cys, Asn, Ser, or Thr, X₃₀ is Leu, Ala, or Val, X₃i is Glu or Pro, X₃₂ is His or Pro, X₃₃ is Leu, Asp, Asn, or Tyr, X₃₄ is Arg, Ala, Asp, Leu, Gln, or Tyr, X₃₅ is Ala, Cys, Phe, Gly, His, Ile, Lys, Leu, Met, Asn, Gln, Arg, Ser, Val, Trp, or Tyr, X₃₆ is Val, Ile, or Lys, X₃₇ is Thr or Ala, X₃₈ is Asp or Gly, X₃₉ is Glu, Lys, or Pro, X₄₀ is Ser or Cys, X₄i is Leu, Asp, Phe, Gln, or Thr, X₄₂ is Val or Phe, X₄₃ is Gln, Ala, His, Phe, Pro, Ser, or Thr, X₄₄ is Cys or Val, X₄₅ is Trp or Arg, X₄₆ is Ser, Arg, Ala, Asp, Glu, Phe, Gly, His, Ile, Lys, Leu, Met, Asn, Pro, Gln, Thr, Val, Trp, or Tyr, X₄₇ is Trp, Lys, Ala, Asp, Glu, Phe, Gly, His, Ile, Lys, Leu, Met, Asn, Pro, Gln, Arg, Ser, Thr, Val, or Tyr, X₄₈ is Lys or Val, X₄₉ is Ala, Cys, Ser, or Val, X₅₀ is Cys, Leu, or Val, X₅₁ is Val or Arg, and X₅₂ is Leu, Gln, His, Ile, Lys, or Ser, and the sialidase comprises at least one mutation relative to wild-type human Neu2 (SEQ ID NO: 1). In certain embodiments, the recombinant mutant human sialidase is then modified, or has been modified, to include one or more modifications to decrease protease sensitivity.

[0150] In certain embodiments, the recombinant mutant human sialidase comprises the amino acid sequence of

(SEQ ID NO: 200)
X₁ASLPX₂LQX₃ESVFQSGAHAYRIPALLYLPGQQSLLAFAEQRX₄SKKD
EHAELIVLRRGDYDAX₅THQVQWQAQEVVAQARLDGHRSMNPCPLYDX₆
QTGTLFLFFIAIPGQVTEQQQLQTRANVTRLCX₇VTSTDHGRTWSSPRD
LTDAAIGPAYREWSTFAVGPGHCLQLHDRARSLVVPAYAYRKLHPX₈QR
PIPSAFCFLSHDHGRTWARGHFVAQDTLECQVAEVETGEQRVVTLNARS
HLRX₉RVQAQSTNDGLDFQESQLVKKLVEPPPX₁₀GCQGSVISFPSPRSG
PGSPAQWLLYTHPTHX₁₁X₁₂QRADLGAYLNPRPPAPEAWSEPVLLAKGS
X₁₃AYSDLQSMGTGPDGSPLFGCLYEANDYEEIX₁₄FX₁₅MFTLKQAFPAE
YLPQ,

wherein X₁ is Ala, Arg, Asn, Asp, Gln, Glu, Gly, His, Leu, Lys, Met, Phe, Thr, Val, or not present, X₂ is Phe, Trp, Tyr or Val, X₃ is Lys or Asp, X₄ is Arg or Ala, X₅ is Pro, Asn, Asp, His, Glu, Gly, Ser or Thr, X₆ is Ala, Glu, or Lys, X₇ is Gln, Leu, Glu, Phe, His, Ile, Leu, or Tyr, X₈ is Arg, Ile, or Lys, X₉ is Ala, Cys, Phe, Gly, His, Ile, Lys, Leu, Met, Asn, Gln, Arg, Ser, Val, Trp, or Tyr, X₁₀ is Gln, Ala, His, Phe, Pro, Ser, or Thr, X₁₁ is Ser, Arg, Ala, Asp, Glu, Phe, Gly, His, Ile, Lys, Leu, Met, Asn, Pro, Gln, Thr, Val, Trp, or Tyr, X₁₂ is Trp, Lys, Ala, Asp, Glu, Phe, Gly, His, Ile, Lys, Leu, Met, Asn, Pro, Gln, Arg, Ser, Thr, Val, or Tyr, X₁₃ is Ala, Cys, Ser, or Val, X₁₄ is Val or Arg, and X₁₅ is Leu, Gln, His, Ile, Lys, or Ser, and the sialidase comprises at least one mutation relative to wild-type human Neu2 (SEQ ID NO: 1). In certain embodiments, X₁ is Ala, Asp, Met, or not present, X₂ is Tyr or Val, X₃ is Lys or Asp, X₄ is Arg or Ala, X₅ is Pro, Asn, Gly, Ser or Thr, X₆ is Ala or Glu, X₇ is Gln or Tyr, X₈ is Ile or Lys, X₉ is Ala or Thr, X₁₀ is Gln, Ala, or Thr, X₁₁ is Ser, Arg, or Ala, X₁₂ is Trp, Lys, or Arg, X₁₃ is Ala or Cys, X₁₄ is Val or Arg, and X₁₅ is Leu or Ile. In certain embodiments, the recombinant mutant human sialidase is then modified, or has been modified, to include one or more modifications to decrease protease sensitivity.

[0151] In certain embodiments, the recombinant mutant human sialidase comprises the amino acid sequence of

(SEQ ID NO: 47)
X₁X₂SX₃X₄X₅LQX₆ESVFQSGAHAYRIPALLYLPGQQSLLAFAEQRASX₇
X₈DEHAELIVX₉RRGDYDAX₁₀THQVQWX₁₁AQEVVAQAX₁₂LDGHRSMNPC
PLYDX₁₃QTGTLFLFFIAIPX₁₄X₁₅VTEX₁₆QQLQTRANVTRLX₁₇X₁₈VTS
TDHGRTWSSPRDLTDAAIGPX₁₉YREWSTFAVGPGHX₂₀LQLHDRX₂₁RSL
VVPAYAYRKLHPX₂₂QRPIPSAFX₂₃FLSHDHGRTWARGHFVAQDTX₂₄EC
QVAEVETGEQRVVTLNARSHLRARVQAQSX₂₅NX₂₆GLDFQX₂₇SQLVKKL
VEPPPX₂₈GX₂₉QGSVISFPSPRSGPGSPAQX₃₀LLYTHPTHX₃₁X₃₂QRAD
LGAYLNPRPPAPEAWSEPX₃₃LLAKGSX₃₄AYSDLQSMGTGPDGSPLFG
X₃₅LYEANDYEEIX₃₆FX₃₇MFTLKQAFPAEYLPQ,

wherein X₁ is Ala, Arg, Asn, Asp, Gln, Glu, Gly, His, Leu, Lys, Met, Phe, Thr, Val, or not present, X₂ is Ala or Lys, X₃ is Asn or Leu, X₄ is Pro or His, X₅ is Phe, Trp, Tyr or Val, X₆ is Lys or Asp; X₇ is Lys, Arg, or Glu. X₈ is Lys, Ala, Arg, or Glu, X₉ is Leu or Met, X₁₀ is Pro, Asn, Asp, His, Glu, Gly, Ser or Thr, X₁₁ is Gln or His, X₁₂ is Arg or Lys, X₁₃ is Ala, Glu or Lys, X₁₄ is Gly or Asp, X₁₅ is Gln or His, X₁₆ is Gln, Arg, or Lys, X₁₇ is Ala, Cys, Ile, Ser, Val, or Leu, X₁₈ is Gln or Leu, X₁₉ is Ala or Val, X₂₀ is Cys or Gly, X₂₁ is Ala or Gly, X₂₂ is Arg, Ile, or Lys, X₂₃ is Ala, Cys, Leu, or Val, X₂₄ is Leu, Ala, or Val, X₂₅ is Thr or Ala, X₂₆ is Asp or Gly, X₂₇ is Glu or Lys, X₂₈ is Gln, Ala, His, Phe, or Pro, X₂₉ is Cys or Val, X₃₀ is Trp or Arg, X₃₁ is Ser or Arg, X₃₂ is Trp or Lys, X₃₃ is Lys or Val, X₃₄ is Ala, Cys, Ser, or Val, X₃₅ is Cys, Leu, or Val, X₃₆ is Val or Arg, and X₃₇ is Leu, Gln, His, Ile, Lys, or Ser, and the sialidase comprises at least one mutation relative to wild-type human Neu2 (SEQ ID NO: 1). In certain embodiments, the recombinant mutant human sialidase is then modified, or has been modified, to include one or more modifications to decrease protease sensitivity.

[0152] In certain embodiments, the recombinant mutant human sialidase comprises the amino acid sequence of

(SEQ ID NO: 46)
X₁ASLPX₂LQX₃ESVFQSGAHAYRIPALLYLPGQQSLLAFAEQRASKKDE
HAELIVLRRGDYDAX₄THQVQWQAQEVVAQARLDGHRSMNPCPLYDX₅Q
TGTLFLFFIAIPGQVTEQQQLQTRANVTRLCQVTSTDHGRTWSSPRDLT
DAAIGPAYREWSTFAVGPGHCLQLHDRARSLVVPAYAYRKLHPX₆QRPI
PSAFCFLSHDHGRTWARGHFVAQDTLECQVAEVETGEQRVVTLNARSHL
RARVQAQSTNDGLDFQESQLVKKLVEPPPX₇GCQGSVISFPSPRSGPGS
PAQWLLYTHPTHX₈X₉QRADLGAYLNPRPPAPEAWSEPVLLAKGSX₁₀AY
SDLQSMGTGPDGSPLFGCLYEANDYEEIX₁₁FX₁₂MFTLKQAFPAEYLPQ,

wherein X₁ is Ala, Arg, Asn, Asp, Gln, Glu, Gly, His, Leu, Lys, Met, Phe, Thr, Val, or not present, X₂ is Phe, Trp, Tyr or Val, X₃ is Lys or Asp, X₄ is Pro, Asn, Asp, His, Glu, Gly, Ser or Thr, X₅ is Ala, Glu, or Lys, X₆ is Arg, Ile, or Lys, X₇ is Gln, Ala, His, Phe, or Pro, X₈ is Ser or Arg, X₉ is Trp or Lys, X₁₀ is Ala, Cys, Ser, or Val, X₁₁ is Val or Arg, and X₁₂ is Leu, Gln, His, Ile, Lys, or Ser, and the sialidase comprises at least one mutation relative to wild-type human Neu2 (SEQ ID NO: 1). In certain embodiments, X₁ is Ala, Asp, Met, or not present, X₂ is Tyr or Val, X₃ is Lys or Asp, X₄ is Pro, Asn, Gly, Ser or Thr, X₅ is Ala or Glu, X₆ is Ile or Lys, X₇ is Gln or Ala, X₈ is Ser or Arg, X₉ is Trp or Lys, X₁₀ is Ala or Cys, X₁₁ is Val or Arg, and X₁₂ is Leu or Ile. In certain embodiments, the recombinant mutant human sialidase is then modified, or has been modified, to include one or more modifications to decrease protease sensitivity.

[0153] In certain embodiments, the recombinant mutant human sialidase comprises the amino acid sequence of

(SEQ ID NO: 182)
X₁X₂SX₃X₄X₅LQX₆ESVFQSGAHAYRIPALLYLPGQQSLLAFAEQRASX₇X₈
DEHAELIVX₉RRGDYDAX₁₀THQVQWX₁₁AQEVVAQAX₁₂LX₁₃GHRSMNPCP
LYDX₁₄QTGTLFLFFIAIPX₁₅X₁₆VTEX₁₇QQLQTRANVTRLX₁₈X₁₉VTSTD
HGRTWSSPRDLTDAAIGPX₂₀YREWSTFAVGPGHX₂₁LQLHDX₂₂X₂₃RSLVV
PAYAYRKLHPX₂₄X₂₅X₂₆PIPSAFX₂₇FLSHDHGRTWARGHFVX₂₈QDTX₂₉E
CQVAEVX₃₀TGEQRVVTLNARSX₃₁X₃₂X₃₃X₃₄RX₃₅QAQSX₃₆NX₃₇GLDFQ
X₃₈X₃₉QX₄₀VKKLX₄₁EPPPX₄₂GX₄₃QGSVISFPSPRSGPGSPAQX₄₄LLYTH
PTHX₄₅X₄₆QRADLGAYLNPRPPAPEAWSEPX₄₇LLAKGSX₄₈AYSDLQSMGT
GPDGSPLFGX₄₉LYEANDYEEIX₅₀FX₅₁MFTLKQAFPAEYLPQ,

wherein X₁ is Ala, Arg, Asn, Asp, Gln, Glu, Gly, His, Leu, Lys, Met, Phe, Thr, Val, or not present, X₂ is Ala or Lys, X₃ is Asn or Leu, X₄ is Pro or His, X₅ is Phe, Trp, Tyr or Val, X₆ is Lys or Asp, X₇ is Lys, Arg, or Glu, X₈ is Lys, Ala, Arg, or Glu, X₉ is Leu or Met, X₁₀ is Pro, Asn, Asp, His, Glu, Gly, Ser or Thr, X₁₁ is Gln or His, X₁₂ is Arg or Lys, X₁₃ is Asp or Pro, X₁₄ is Ala, Glu or Lys, X₁₅ is Gly or Asp, X₁₆ is Gln or His, X₁₇ is Gln, Arg, or Lys, X₁₈ is Ala, Cys, Ile, Ser, Val, or Leu, X₁₉ is Gln, Leu, Glu, Phe, His, Ile, Leu, or Tyr, X₂₀ is Ala or Val, X₂₁ is Cys or Gly, X₂₂ is Arg or Pro, X₂₃ is Ala or Gly, X₂₄ is Arg, Ile, or Lys, X₂₅ is Gln or Pro, X₂₆ is Arg or Pro, X₂₇ is Ala, Cys, Leu, or Val, X₂₈ is Ala, Cys, Asn, Ser, or Thr, X₂₉ is Leu, Ala, or Val, X₃₀ is Glu or Pro, X₃₁ is His or Pro, X₃₂ is Leu, Asp, Asn, or Tyr, X₃₃ is Arg, Ala, Asp, Leu, Gln, or Tyr, X₃₄ is Ala, Cys, Phe, Gly, His, Ile, Lys, Leu, Met, Asn, Gln, Arg, Ser, Val, Trp, or Tyr, X₃₅ is Val, Ile, or Lys, X₃₆ is Thr or Ala, X₃₇ is Asp or Gly, X₃₈ is Glu, Lys, or Pro, X₃₉ is Ser or Cys, X₄₀ is Leu, Asp, Phe, Gln, or Thr, X₄₁ is Val or Phe, X₄₂ is Gln, Ala, His, Phe, Pro, Ser, or Thr, X₄₃ is Cys or Val, X₄₄ is Trp or Arg, X₄₅ is Ser, Arg, Ala, Asp, Glu, Phe, Gly, His, Ile, Lys, Leu, Met, Asn, Pro, Gln, Thr, Val, Trp, or Tyr, X₄₆ is Trp, Lys, Ala, Asp, Glu, Phe, Gly, His, Ile, Lys, Leu, Met, Asn, Pro, Gln, Arg, Ser, Thr, Val, or Tyr, X₄₇ is Lys or Val, X₄₈ is Ala, Cys, Ser, or Val, X₄₉ is Cys, Leu, or Val, X₅₀ is Val or Arg, and X₅₁ is Leu, Gln, His, Ile, Lys, or Ser, and the sialidase comprises at least one mutation relative to wild-type human Neu2 (SEQ ID NO: 1). In certain embodiments, the recombinant mutant human sialidase is then modified, or has been modified, to include one or more modifications to decrease protease sensitivity.

[0154] In certain embodiments, the recombinant mutant human sialidase comprises the amino acid sequence of

(SEQ ID NO: 183)
X₁ASLPX₂LQX₃ESVFQSGAHAYRIPALLYLPGQQSLLAFAEQRASKKDE
HAELIVLRRGDYDAX₄THQVQWQAQEVVAQARLDGHRSMNPCPLYDX₅QT
GTLFLFFIAIPGQVTEQQQLQTRANVTRLCX₆VTSTDHGRTWSSPRDLT
DAAIGPAYREWSTFAVGPGHCLQLHDRARSLVVPAYAYRKLHPX₇QRPI
PSAFCFLSHDHGRTWARGHFVAQDTLECQVAEVETGEQRVVTLNARSHL
RX₈RVQAQSTNDGLDFQESQLVKKLVEPPPX₉GCQGSVISFPSPRSGPGS
PAQWLLYTHPTHX₁₀X₁₁QRADLGAYLNPRPPAPEAWSEPVLLAKGSX₁₂A
YSDLQSMGTGPDGSPLFGCLYEANDYEEIX₁₃FX₁₄MFTLKQAFPAEYLPQ,

wherein X₁ is Ala, Arg, Asn, Asp, Gln, Glu, Gly, His, Leu, Lys, Met, Phe, Thr, Val, or not present, X₂ is Phe, Trp, Tyr or Val, X₃ is Lys or Asp, X₄ is Pro, Asn, Asp, His, Glu, Gly, Ser or Thr, X₅ is Ala, Glu, or Lys, X₆ is Gln, Leu, Glu, Phe, His, Ile, Leu, or Tyr, X₇ is Arg, Ile, or Lys, X₈ is Ala, Cys, Phe, Gly, His, Ile, Lys, Leu, Met, Asn, Gln, Arg, Ser, Val, Trp, or Tyr, X₉ is Gln, Ala, His, Phe, Pro, Ser, or Thr, X₁₀ is Ser, Arg, Ala, Asp, Glu, Phe, Gly, His, Ile, Lys, Leu, Met, Asn, Pro, Gln, Thr, Val, Trp, or Tyr, X₁₁ is Trp, Lys, Ala, Asp, Glu, Phe, Gly, His, Ile, Lys, Leu, Met, Asn, Pro, Gln, Arg, Ser, Thr, Val, or Tyr, X₁₂ is Ala, Cys, Ser, or Val, X₁₃ is Val or Arg, and X₁₄ is Leu, Gln, His, Ile, Lys, or Ser, and the sialidase comprises at least one mutation relative to wild-type human Neu2 (SEQ ID NO: 1). In certain embodiments, X₁ is Ala, Asp, Met, or not present, X₂ is Tyr or Val, X₃ is Lys or Asp, X₄ is Pro, Asn, Gly, Ser or Thr, X₅ is Ala or Glu, X₆ is Gln or Tyr, X₇ is Ile or Lys, X₈ is Ala or Thr, X₉ is Gln, Ala, or Thr, X₁₀ is Ser, Arg, or Ala, X₁₁ is Trp, Lys, or Arg, X₁₂ is Ala or Cys, X₁₃ is Val or Arg, and X₁₄ is Leu or Ile. In certain embodiments, the recombinant mutant human sialidase is then modified, or has been modified, to include one or more modifications to decrease protease sensitivity.

[0155] In certain embodiments, the recombinant mutant human sialidase comprises a conservative substitution relative to a recombinant mutant human sialidase sequence disclosed herein. As used herein, the term “conservative substitution” refers to a substitution with a structurally similar amino acid. For example, conservative substitutions may include those within the following groups: Ser and Cys; Leu, Ile, and Val; Glu and Asp; Lys and Arg; Phe, Tyr, and Trp; and Gln, Asn, Glu, Asp, and His. Conservative substitutions may also be defined by the BLAST (Basic Local Alignment Search Tool) algorithm, the BLOSUM substitution matrix (e.g., BLOSUM 62 matrix), or the PAM substitution:p matrix (e.g., the PAM 250 matrix).

[0156] Sequence identity may be determined in various ways that are within the skill of a person skilled in the art, e.g., using publicly available computer software such as BLAST, BLAST-2, ALIGN or Megalign (DNASTAR) software. BLAST (Basic Local Alignment Search Tool) analysis using the algorithm employed by the programs blastp, blastn, blastx, tblastn and tblastx (Karlin et al., (1990) Proc. Natl. Acad. Sci. USA 87:2264-2268; Altschul, (1993) J. Mol. Evol. 36:290-300; Altschul et al., (1997) Nucleic Acids Res. 25:3389-3402, incorporated by reference herein) are tailored for sequence similarity searching. For a discussion of basic issues in searching sequence databases see Altschul et al., (1994) Nature Genetics 6:119-129, which is fully incorporated by reference herein. Those skilled in the art can determine appropriate parameters for measuring alignment, including any algorithms needed to achieve maximal alignment over the full length of the sequences being compared. The search parameters for histogram, descriptions, alignments, expect (i.e., the statistical significance threshold for reporting matches against database sequences), cutoff, matrix and filter are at the default settings. The default scoring matrix used by blastp, blastx, tblastn, and tblastx is the BLOSUM62 matrix (Henikoff et al., (1992) Proc. Natl. Acad. Sci. USA 89:10915-10919, fully incorporated by reference herein). Four blastn parameters may be adjusted as follows: Q=10 (gap creation penalty); R=10 (gap extension penalty); wink=1 (generates word hits at every wink.sup.th position along the query); and gapw=16 (sets the window width within which gapped alignments are generated). The equivalent blastp parameter settings may be Q=9; R=2; wink=1; and gapw=32. Searches may also be conducted using the NCBI (National Center for Biotechnology Information) BLAST Advanced Option parameter (e.g.: −G, Cost to open gap [Integer]: default=5 for nucleotides/11 for proteins; −E, Cost to extend gap [Integer]: default=2 for nucleotides/1 for proteins; −q, Penalty for nucleotide mismatch [Integer]: default=−3; −r, reward for nucleotide match [Integer]: default=1; −e, expect value [Real]: default=10; —W, wordsize [Integer]: default=11 for nucleotides/28 for megablast/3 for proteins; −y, Dropoff (X) for blast extensions in bits: default=20 for blastn/7 for others; −X, X dropoff value for gapped alignment (in bits): default=15 for all programs, not applicable to blastn; and −Z, final X dropoff value for gapped alignment (in bits): 50 for blastn, 25 for others). ClustalW for pairwise protein alignments may also be used (default parameters may include, e.g., Blosum62 matrix and Gap Opening Penalty=10 and Gap Extension Penalty=0.1). A Bestfit comparison between sequences, available in the GCG package version 10.0, uses DNA parameters GAP=50 (gap creation penalty) and LEN=3 (gap extension penalty). The equivalent settings in Bestfit protein comparisons are GAP=8 and LEN=2.

### II. Fusion Proteins/Antibody Conjugates

[0157] To promote the selective removal of sialic acids on hypersialylated cancer cells and/or in the tumor microenvironment, it may be helpful to target a sialidase as described herein to such a cell or to such a tumor microenvironment. Additionally, in order to promote the removal of sialic acid by a sialidase in a subject, it may be helpful to extend the plasma half-life of the sialidase in the subject. These can be achieved by including the sialidase in a fusion protein and/or antibody conjugate (e.g., a chemically conjugated conjugate).

[0158] Accordingly, the invention further provides fusion proteins comprising a sialidase enzyme, or a functional fragment thereof, and a portion or fragment of an antibody, such as an immunoglobulin Fc domain (also referred to herein as an Fc domain), or an immunoglobulin antigen-binding domain (also referred to herein as an antigen-binding domain). In certain embodiments, the sialidase and antibody or portion thereof (e.g., immunoglobulin Fc domain or antigen-binding domain) are linked by a peptide bond or an amino acid linker.

[0159] As used herein, unless otherwise indicated, the term “fusion protein” is understood to refer to a single polypeptide chain comprising amino acid sequences based upon two or more separate proteins or polypeptide chains, where the two amino acid sequences may be fused together directly or via an intervening linker sequence, e.g., via an intervening amino acid linker. A nucleotide sequence encoding a fusion protein can, for example, be created using conventional recombinant DNA technologies.

[0160] In certain embodiments, the fusion protein comprises a tag, such as a Strep tag (e.g., a Strep II tag), a His tag (e.g., a 10×His tag), a myc tag, or a FLAG tag. The tag can be located on the C-terminus or the N-terminus of the fusion protein. In certain embodiments, a fusion protein comprises a sialidase portion joined to a polypeptide comprising an immunoglobulin heavy chain in an N- to C-terminal orientation, wherein the sialidase portion comprises an N-terminal addition of MEDLRP (SEQ ID NO: 4), and a Strep II Tag is located on the C-terminus of the immunoglobulin heavy chain or the N-terminus of the sialidase portion.

[0161] a. Sialidase Portion

[0162] The sialidase portion of the fusion protein described herein can be any sialidase, e.g., a fungal, bacterial, non-human mammalian or human sialidase. In certain embodiments, the sialidase portion is a recombinant human sialidase comprising at least one mutation relative to a wild-type human sialidase, e.g., a substitution, deletion, or addition of at least one amino acid, as described above.

[0163] In certain embodiments, the sialidase is any recombinant mutant human sialidase disclosed herein, or a functional fragment thereof.

[0164] In certain embodiments, the sialidase (e.g., human sialidase) is engineered to include one or more modifications, for example, an amino acid deletion, amino acid addition, or amino acid substitution, to decrease protease sensitivity, and may then, alternatively or in addition, include one or more of the following substitutions.

[0165] In certain embodiments, the sialidase portion comprises a C332A and C352L mutation. In certain embodiments, the sialidase comprises an N-terminal addition of MEDLRP (SEQ ID NO: 4) or EDLRP (SEQ ID NO: 3). In certain embodiments, the sialidase portion comprises a LSHSLST (SEQ ID NO: 22) peptide on the N-terminus. In certain embodiments, the sialidase portion comprises an N-terminal addition of MEDLRP (SEQ ID NO: 4) and an A2K substitution. In certain embodiments, the sialidase portion comprises an N-terminal addition of MEDLRP (SEQ ID NO: 4) and a C332A substitution. In certain embodiments, the sialidase portion comprises an N-terminal addition of MEDLRP (SEQ ID NO: 4), a C332A substitution, and a C352L substitution.

[0166] In certain embodiments, the sialidase portion comprises an M1 deletion (ΔM1), M1A substitution, M1D substitution, V6Y substitution, K9D substitution, A42R substitution, P62G substitution, P62N substitution, P62S substitution, P62T substitution, A93E substitution, Q126Y substitution, I187K substitution, A242F substitution, A242T substitution, Q270A substitution, Q270T substitution, S301R substitution, S301R substitution, W302K substitution, W302R substitution, C332A substitution, V363R substitution, L365I substitution, or a combination of any of the foregoing.

[0167] In certain embodiments, the sialidase portion comprises the amino acid sequence of any one of SEQ ID NOs: 48-54, 149, 154, 159, 191, or 198, or an amino acid sequence that has at least 85%, 90%, 95%, 96%, 97%, 98%, or 99% sequence identity to any one of SEQ ID NOs: 48-54, 149, 154, 159, 191, or 198.

[0168] b. Antibody Portion

[0169] As used herein, unless otherwise indicated, the term “antibody” is understood to mean an intact antibody (e.g., an intact monoclonal antibody), or a fragment thereof, such as a Fc fragment of an antibody (e.g., an Fc fragment of a monoclonal antibody), or an antigen-binding fragment of an antibody (e.g., an antigen-binding fragment of a monoclonal antibody), including an intact antibody, antigen-binding fragment, or Fc fragment that has been modified, engineered, or chemically conjugated. Examples of antigen-binding fragments include Fab, Fab′, (Fab′)₂, Fv, single chain antibodies (e.g., scFv), minibodies, and diabodies. Examples of antibodies that have been modified or engineered include chimeric antibodies, humanized antibodies, and multispecific antibodies (e.g., bispecific antibodies). An example of a chemically conjugated antibody is an antibody conjugated to a toxin moiety.

[0170] In certain embodiments, the fusion protein comprises an immunoglobulin Fc domain. As used herein, unless otherwise indicated, the term “immunoglobulin Fc domain” refers to a fragment of an immunoglobulin heavy chain constant region which, either alone or in combination with a second immunoglobulin Fc domain, is capable of binding to an Fc receptor. An immunoglobulin Fc domain may include, e.g., immunoglobulin CH2 and CH3 domains. An immunoglobulin Fc domain may include, e.g., immunoglobulin CH2 and CH3 domains and an immunoglobulin hinge region. Boundaries between immunoglobulin hinge regions, CH2, and CH3 domains are well known in the art, and can be found, e.g., in the PROSITE database (available on the world wide web at prosite.expasy.org).

[0171] In certain embodiments, the immunoglobulin Fc domain is derived from a human IgG1, IgG2, IgG3, IgG4, IgA1, IgA2, IgD, IgE, and IgM Fc domain. A single amino acid substitution (S228P according to Kabat numbering; designated IgG4Pro) may be introduced to abolish the heterogeneity observed in recombinant IgG4 antibody. See Angal, S. et al. (1993) MOL. IMMUNOL. 30:105-108.

[0172] In certain embodiments, the immunoglobulin Fc domain is derived from a human IgG1 isotype or another isotype that elicits antibody-dependent cell-mediated cytotoxicity (ADCC) and/or complement mediated cytotoxicity (CDC). In certain embodiments, the immunoglobulin Fc domain is derived from a human IgG1 isotype (e.g., SEQ ID NO: 31, SEQ ID NO: 5, or SEQ ID NO: 211).

[0173] In certain embodiments, the immunoglobulin Fc domain is derived from a human IgG4 isotype or another isotype that elicits little or no antibody-dependent cell-mediated cytotoxicity (ADCC) and/or complement mediated cytotoxicity (CDC). In certain embodiments, the immunoglobulin Fc domain is derived from a human IgG4 isotype.

[0174] In certain embodiments, the immunoglobulin Fc domain comprises either a “knob” mutation, e.g., T366Y, or a “hole” mutation, e.g., Y407T, for heterodimerization with a second polypeptide (residue numbers according to EU numbering, Kabat, E. A., et al. (1991) SEQUENCES OF PROTEINS OF IMMUNOLOGICAL INTEREST, FIFTH EDITION, U.S. Department of Health and Human Services, NIH Publication No. 91-3242). For example, in certain embodiments, the immunoglobulin Fc domain is derived from a human IgG1 Fc domain and comprises a Y407T mutation (e.g., the fusion protein comprises SEQ ID NO: 32, SEQ ID NO: 147, SEQ ID NO: 213, or SEQ ID NO: 215). In certain embodiments, the immunoglobulin Fc domain is derived from a human IgG1 Fc domain and comprises a T366Y mutation (e.g., the fusion protein comprises SEQ ID NO: 33, SEQ ID NO: 148, SEQ ID NO: 214, or SEQ ID NO: 216).

[0175] In certain embodiments, the immunoglobulin Fc domain is modified to prevent glycosylation of the Fc domain. For example, in certain embodiments, the immunoglobulin Fc domain is derived from a human IgG1 Fc domain and comprises a mutation at position N297, for example, an N297A mutation (residue numbers according to EU numbering, Kabat, E. A., et al., supra). For example, in certain embodiments, the fusion protein comprises SEQ ID NO: 212, SEQ ID NO: 215, or SEQ ID NO: 216.

[0176] In certain embodiments, the fusion protein comprises an immunoglobulin antigen-binding domain. The inclusion of such a domain may improve targeting of a fusion protein to a sialylated cancer cell and/or to the tumor microenvironment. As used herein, unless otherwise indicated, the term “immunoglobulin antigen-binding domain” refers to a polypeptide that, alone or in combination with another immunoglobulin antigen-binding domain, defines an antigen-binding site. Exemplary immunoglobulin antigen-binding domains include, for example, immunoglobulin heavy chain variable region and an immunoglobulin light chain variable region, where the variable regions together define an antigen binding site.

[0177] The immunoglobulin antigen-binding domain and/or antigen binding site can be derived from an antibody selected from, for example, adecatumumab, ascrinvacumab, cixutumumab, conatumumab, daratumumab, drozitumab, duligotumab, durvalumab, dusigitumab, enfortumab, enoticumab, epratuxumab, figitumumab, ganitumab, glembatumumab, intetumumab, ipilimumab, iratumumab, icrucumab, lexatumumab, lucatumumab, mapatumumab, narnatumab, necitumumab, nesvacumab, ofatumumab, olaratumab, panitumumab, patritumab, pritumumab, radretumab, ramucirumab, rilotumumab, robatumumab, seribantumab, tarextumab, teprotumumab, tovetumab, vantictumab, vesencumab, votumumab, zalutumumab, flanvotumab, altumomab, anatumomab, arcitumomab, bectumomab, blinatumomab, detumomab, ibritumomab, minretumomab, mitumomab, moxetumomab, naptumomab, nofetumomab, pemtumomab, pintumomab, racotumomab, satumomab, solitomab, taplitumomab, tenatumomab, tositumomab, tremelimumab, abagovomab, atezolizumab, durvalumab, avelumab, igovomab, oregovomab, capromab, edrecolomab, nacolomab, amatuximab, bavituximab, brentuximab, cetuximab, derlotuximab, dinutuximab, ensituximab, futuximab, girentuximab, indatuximab, isatuximab, margetuximab, rituximab, siltuximab, ublituximab, ecromeximab, abituzumab, alemtuzumab, bevacizumab, bivatuzumab, brontictuzumab, cantuzumab, cantuzumab, citatuzumab, clivatuzumab, dacetuzumab, demcizumab, dalotuzumab, denintuzumab, elotuzumab, emactuzumab, emibetuzumab, enoblituzumab, etaracizumab, farletuzumab, ficlatuzumab, gemtuzumab, imgatuzumab, inotuzumab, labetuzumab, lifastuzumab, lintuzumab, lirilumab, lorvotuzumab, lumretuzumab, matuzumab, milatuzumab, moxetumomab, nimotuzumab, obinutuzumab, ocaratuzumab, otlertuzumab, onartuzumab, oportuzumab, parsatuzumab, pertuzumab, pidilizumab, pinatuzumab, polatuzumab, sibrotuzumab, simtuzumab, tacatuzumab, tigatuzumab, trastuzumab, tucotuzumab, urelumab, vandortuzumab, vanucizumab, veltuzumab, vorsetuzumab, sofituzumab, catumaxomab, ertumaxomab, depatuxizumab, ontuxizumab, blontuvetmab, tamtuvetmab, nivolumab, pembrolizumab, epratuzumab, MEDI9447, urelumab, utomilumab, hu3F8, hu14.18-IL-2, 3F8/OKT3BsAb, lirilumab, BMS-986016 pidilizumab, AMP-224, AMP-514, BMS-936559, atezolizumab, and avelumab. In certain embodiments, the immunoglobulin antigen-binding domain can be derived from an antibody selected from trastuzumab, daratumumab, girentuximab, ofatumumab, avelumab, and rituximab.

[0178] In certain embodiments, the immunoglobulin antigen-binding domain is derived from trastuzumab. The trastuzumab heavy chain amino acid sequence is depicted in SEQ ID NO: 63, and the trastuzumab light chain amino acid sequence is depicted in SEQ ID NO: 64. The amino acid sequence of an exemplary scFv derived from trastuzumab is depicted in SEQ ID NO: 65.

[0179] The immunoglobulin antigen-binding domain and/or antigen binding site can be derived from an antibody that binds a cancer antigen selected from, for example, adenosine A2a receptor (A2aR), A kinase anchor protein 4 (AKAP4), B melanoma antigen (BAGE), brother of the regulator of imprinted sites (BORIS), breakpoint cluster region Abelson tyrosine kinase (BCR/ABL), CA125, CAIX, CD19, CD20, CD22, CD30, CD33, CD52, CD73, CD137, carcinoembryonic antigen (CEA), a claudin (e.g. a claudin 18, e.g., claudin 18.2), CS1, cytotoxic T-lymphocyte-associated antigen 4 (CTLA-4), estrogen receptor binding site associated antigen 9 (EBAG9), epidermal growth factor (EGF), epidermal growth factor receptor (EGFR), EGF-like module receptor 2 (EMR2), epithelial cell adhesion molecule (EpCAM) (17-1A), FR-alpha, G antigen (GAGE), disialoganglioside GD2 (GD2), glycoprotein 100 (gp100), human epidermal growth factor receptor 2 (HER2), hepatocyte growth factor (HGF), human papillomavirus 16 (HPV-16), heat-shock protein 105 (HSP105), isocitrate dehydrogenase type 1 (IDH1), idiotype (NeuGcGM3), indoleamine-2,3-dioxygenase 1 (IDO1), IGF-1, IGF1R, IGG1K, killer cell immunoglobulin-like receptor (KIR), lymphocyte activation gene 3 (LAG-3), lymphocyte antigen 6 complex K (LY6K), Matrix-metalloproteinase-16 (MMP16), melanotransferrin (MFI2), melanoma antigen 3 (MAGE-A3), melanoma antigen C2 (MAGE-C2), melanoma antigen D4 (MAGE-D4), melanoma antigen recognized by T-cells 1 (Melan-A/MART-1), N-methyl-N′-nitroso-guanidine human osteosarcoma transforming gene (MET), mucin 1 (MUC1), mucin 4 (MUC4), mucin 16 (MUC16), New York esophageal squamous cell carcinoma 1 (NY-ESO-1), prostatic acid phosphatase (PAP), programmed cell death receptor 1 (PD-1), programmed cell death receptor ligand 1 (PD-L1), phosphatidylserine, preferentially expressed antigen of melanoma (PRAME), prostate specific antigen (PSA), protein tyrosine kinase 7 (PTK7, also known as colon carcinoma kinase 4 (CCK4)), receptor tyrosine kinase orphan receptor 1 (ROR1), scatter factor receptor kinase, sialyl-Tn, sperm-associated antigen 9 (SPAG-9), synovial sarcoma X-chromosome breakpoint 1 (SSX1), survivin, telomerase, T-cell immunoglobulin domain and mucin domain-3 (TIM-3), vascular endothelial growth factor (VEGF) (e.g., VEGF-A), vascular endothelial growth factor Receptor 2 (VEGFR2), V-domain immunoglobulin-containing suppressor of T-cell activation (VISTA), Wilms' Tumor-1 (WT1), X chromosome antigen 1b (XAGE-1b), 5T4, Mesothelin, Glypican 3 (GPC3), Folate Receptor α (FRα), Prostate Specific Membrane Antigen (PSMA), cMET, CD38, B Cell Maturation Antigen (BCMA), CD123, CLDN6, CLDN9, LRRC15, PRLR (Prolactin Receptor), RING finger protein 43 (RNF43), Uroplakin-1 B (UPK1 B), tumor necrosis factor superfamily member 9 (TNFSF9), tumor necrosis factor receptor superfamily member 21 (TNFSRF21), bone morphogenetic protein receptor type-1B (BMPR1B), Kringle domain-containing transmembrane protein 2 (KREMEN2), Delta-like protein 3 (DLL3), Siglec7 and Siglec9. Additional exemplary cancer antigens include those found on cancer stem cells, e.g., SSEA3, SSEA4, TRA-1-60, TRA-1-81, SSEA1, CD133 (AC133), CD90 (Thy-1), CD326 (EpCAM), Cripto-1 (TDGF1), PODXL-1 (Podocalyxin-like protein 1), ABCG2, CD24, CD49f (Integrin a6), Notch2, CD146 (MCAM), CD10 (Neprilysin), CD117 (c-KIT), CD26 (DPP-4), CXCR4, CD34, CD271, CD13 (Alanine aminopeptidase), CD56 (NCAM), CD105 (Endoglin), LGR5, CD114 (CSF3R), CD54 (ICAM-1), CXCR1, 2, TIM-3 (HAVCR2), CD55 (DAF), DLL4 (Delta-like ligand 4), CD20 (MS4A1), and CD96.

[0180] The invention further provides antibody conjugates containing one or more of the fusion proteins disclosed herein. As used herein, unless otherwise indicated, the term “antibody conjugate” is understood to refer to an antibody, or a functional fragment thereof, that comprises antigen-binding activity and/or Fc receptor-binding activity, conjugated (e.g., covalently coupled) to an additional functional moiety. In certain embodiments, the antibody or functional antibody fragment is conjugated to a sialidase enzyme, e.g., a recombinant mutant human sialidase enzyme disclosed herein. In certain embodiments, an antibody conjugate comprises a single polypeptide chain. In certain embodiments, an antibody conjugate comprises two, three, four, or more polypeptide chains that are covalently or non-covalently associated together to produce a multimeric complex, e.g., a dimeric, trimeric or tetrameric complex.

[0181] TABLE 10 shows antibodies and antibody-drug conjugates suitable for use in accordance with the present invention, the antigen bound by the antibody or antibody-drug conjugate, and for certain antibodies, the type of cancer targeted by the antibody or antibody-drug conjugate.

TABLE 10

| Antibody or antibody- | | |
|---|---|---|
| drug conjugate | Cancer Antigen | Cancer Type |
| oregovomab | CA125 | |
| girentuximab | CAIX | |
| obinutuzumab | CD20 | |
| ofatumumab | CD20 | |
| rituximab | CD20 | |
| alemtuzumab | CD52 | |
| Ipilimumab | cytotoxic T-lymphocyte-associated | |
| | antigen 4 (CTLA-4) | |
| tremelimumab | CTLA-4 | |
| Cetuximab | epidermal growth factor receptor | |
| | (EGFR) | |
| necitumumab | EGFR | |
| panitumumab | EGFR | |
| zalutumumab | EGFR | |
| edrecolomab | epithelial cell adhesion molecule | |
| | (EpCAM) (17-1A) | |
| farletuzumab | FR-alpha | |
| Pertuzumab | human epidermal growth factor | |
| | receptor 2 (HER2) | |
| trastuzumab | HER2 | |
| rilotumumab | HGF | |
| figitumumab | IGF-1 | |
| Ganitumab | IGF1R | |
| durvalumab | IGG1K | |
| bavituximab | Phosphatidylserine | |
| onartuzumab | scatter factor receptor kinase | |
| bevacizumab | vascular endothelial growth factor-A | |
| | (VEGF-A) | |
| ramucirumab | vascular endothelial growth factor | |
| | Receptor 2 (VEGFR2) | |
| blinatumomab | CD19 | acute lymphoblastic leukemia |
| | | (ALL) |
| Rituximab; | CD20 | non-Hodgkin's lymphoma |
| ofatumumab; | | (NHL), chronic lymphocytic |
| ibritumomab (e.g., ⁹⁰Y- | | leukemia (CLL) |
| ibritumomab; | | B-cell NHL |
| tositumomab (e.g., | | pre-B ALL |
| ¹³¹I- | | |
| tositumomab | | |
| brentuximab (e.g., | CD30 | Hodgkin's lymphoma |
| brentuximab vedotin | | |
| gemtuzumab (e.g., | CD33 | acute myelogenous leukemia |
| gemtuzumab ozogamicin | | (AML) |
| Alemtuzumab | CD52 | CLL |
| Ipilimumab | cytotoxic T-lymphocyte-associated | Unresectable or metastatic |
| | antigen 4 (CTLA-4) | melanoma |
| cetuximab; | epidermal growth factor receptor | colorectal cancer (CRC) |
| panitumumab | (EGFR) | Head and Neck |
| Catumaxomab | epithelial cell adhesion molecule | Malignant ascites |
| | (EpCAM) | |
| trastuzumab; | human epidermal growth factor | Breast |
| pertuzumab | receptor 2 (HER2) | |
| nivolumab; | programmed cell death receptor 1 | Metastatic melanoma, non- |
| pembrolizumab | (PD-1) | small cell lung cancer |
| | | (NSCLC) |
| Bevacizumab | vascular endothelial growth factor | Breast, Cervical |
| | (VEGF) | CRC, NSCLC |
| | | renal cell carcinoma (RCC), |
| | | Ovarian |
| | | Glioblastoma |
| Ramucirumab | vascular endothelial growth factor | Gastric |
| | receptor 2 (VEGF-R2) | NSCLC |
| Epratuzumab; | CD22 | acute lymphoblastic leukemia |
| moxetumomab; | | (ALL) |
| inotuzumab (e.g., | | |
| inotuzumab ozogamicin) | | |
| MEDI9447 | CD73 | Advanced solid tumors |
| Urelumab; | CD137 | Advanced solid tumors |
| utomilumab (PF- | | |
| 05082566) | | |
| Elotuzumab | CD2 subset 1 (CS1) | Multiple myeloma |
| Tremelimumab | cytotoxic T-lymphocyte-associated | Malignant mesothelioma |
| | antigen 4 (CTLA-4) | |
| Necitumumab | epidermal growth factor receptor | non-small cell lung cancer |
| | (EGFR) | (NSCLC) |
| dinutuximab; hu3F8; | disialoganglioside GD2 (GD2) | Neuroblastoma |
| hu14. 18-IL-2; | | Retinoblastoma |
| 3F8/OKT3BsAb | | Melanoma other solid tumors |
| Racotumomab | Idiotype (NeuGcGM3) | NSCLC, Breast |
| | | Melanoma |
| Lirilumab | killer cell immunoglobulin-like | Lymphoma |
| | receptor (KIR) | |
| BMS-986016 | lymphocyte activation gene 3 | Breast, Hematological, |
| | (LAG-3 | Advanced solid tumors |
| Onartuzumab | N-methyl-N′-nitroso-guanidine | NSCLC |
| | human osteosarcoma transforming | |
| | gene (MET) | |
| abagovomab; | mucin 16 (MUC16) | Ovarian |
| oregovomab | | |
| pidilizumab; | programmed cell death receptor 1 | B-cell lymphoma |
| AMP-224; AMP-514 | (PD-1) | Melanoma, CRC |
| BMS-936559; | programmed cell death receptor | NSCLC, renal cell carcinoma |
| atezolizumab; | ligand 1 (PD-L1) | (RCC) |
| durvalumab; avelumab | | Bladder, Breast |
| | | Melanoma, squamous cell |
| | | carcinoma of the head and |
| | | neck (SCCHN) |
| naptumomab (e.g., | 5T4 | RCC, CRC |
| naptumomab estafenatox) | | Prostate |

[0182] c. Linker

[0183] In certain embodiments, the sialidase portion of the fusion protein can be linked or fused directly to the antibody portion (e.g., immunoglobulin Fc domain and/or immunoglobulin antigen-binding domain) of the fusion protein. In other embodiments, the sialidase portion can be covalently bound to the antibody portion by a linker.

[0184] The linker may couple, with one or more natural amino acids, the sialidase, or functional fragment thereof, and the antibody portions or fragments, where the amino acid (for example, a cysteine amino acid) may be introduced by site-directed mutagenesis. The linker may include one or more unnatural amino acids. It is contemplated that, in certain circumstances, a linker containing for example, one or more sulfhydryl reactive groups (e.g., a maleimide) may covalently link a cysteine in the sialidase portion or the antibody portion that is a naturally occurring cysteine residue or is the product of site-specific mutagenesis.

[0185] The linker may be a cleavable linker or a non-cleavable linker. Optionally or in addition, the linker may be a flexible linker or an inflexible linker.

[0186] The linker should be a length sufficiently long to allow the sialidase and the antibody portions to be linked without steric hindrance from one another and sufficiently short to retain the intended activity of the fusion protein. The linker preferably is sufficiently hydrophilic to avoid or minimize instability of the fusion protein. The linker preferably is sufficiently hydrophilic to avoid or minimize insolubility of the fusion protein. The linker should be sufficiently stable in vivo (e.g., it is not cleaved by serum, enzymes, etc.) to permit the fusion protein to be operative in vivo.

[0187] The linker may be from about 1 angstroms (Å) to about 150 Å in length, or from about 1 Å to about 120 Å in length, or from about 5 Å to about 110 Å in length, or from about 10 Å to about 100 Å in length. The linker may be greater than about 2, 3, 4, 5, 6, 7, 8, 9, 10, 11, 12, 13, 14, 15, 16, 17, 18, 19, 20, 25, 27, 30 or greater angstroms in length and/or less than about 110, 100, 90, 85, 80, 75, 70, 65, 60, 55, 50, 45, 43, 42, 41, 40, 39, 38, 37, 36, 35, 34, 33, 32, 31, or fewer A in length. Furthermore, the linker may be about 5, 10, 15, 20, 25, 30, 35, 40, 45, 50, 55, 60, 65, 70, 75, 80, 85, 90, 95, 100, 110, and 120 Å in length.

[0188] In certain embodiments, the linker comprises a polypeptide linker that connects or fuses the sialidase portion of the fusion protein to the antibody portion (e.g., immunoglobulin Fc domain and/or immunoglobulin antigen-binding domain) of the fusion protein. For example, it is contemplated that a gene encoding a sialidase portion linked directly or indirectly (for example, via an amino acid containing linker) to an antibody portion can be created and expressed using conventional recombinant DNA technologies. For example, the amino terminus of a sialidase portion can be linked to the carboxy terminus of either the light or the heavy chain of an antibody portion. For example, for a Fab fragment, the amino terminus or carboxy terminus of the sialidase can be linked to the first constant domain of the heavy antibody chain (CH1). When a linker is employed, the linker may comprise hydrophilic amino acid residues, such as Gln, Ser, Gly, Glu, Pro, His and Arg. In certain embodiments, the linker is a peptide containing 1-25 amino acid residues, 1-20 amino acid residues, 2-15 amino acid residues, 3-10 amino acid residues, 3-7 amino acid residues, 4-25 amino acid residues, 4-20 amino acid residues, 4-15 amino acid residues, 4-10 amino acid residues, 5-25 amino acid residues, 5-20 amino acid residues, 5-15 amino acid residues, or 5-amino acid residues. Exemplary linkers include glycine and serine-rich linkers, e.g., (GlyGlyPro)ₙ, or (GlyGlyGlyGlySer)ₙ, where n is 1-5. In certain embodiments, the linker comprises, consists, or consists essentially of GGGGS (SEQ ID NO: 184). In certain embodiments, the linker comprises, consists, or consists essentially of GGGGSGGGGS (SEQ ID NO: 145). In certain embodiments, the linker comprises, consists, or consists essentially of EPKSS (SEQ ID NO: 146). Additional exemplary linker sequences are disclosed, e.g., in George et al. (2003) PROTEIN ENGINEERING 15:871-879, and U.S. Pat. Nos. 5,482,858 and 5,525,491.

[0189] In certain embodiments, the fusion protein comprises the amino acid sequence of any one of SEQ ID NOs: 66-85, 98-142, 150-153, 155-158, 160-163, 166-178, 185, 187, 189, 192-197, 203-210, 218, 220, 222, 224, 226, 228, 230, 232, 234, 236, 238, 240, 242, 244, or 249, or an amino acid sequence that has at least 85%, 90%, 95%, 96%, 97%, 98%, or 99% sequence identity to any one of SEQ ID NOs: 66-85, 98-142, 150-153, 155-158, 160-163, 166-178, 185, 187, 189, 192-197, 203-210, 218, 220, 222, 224, 226, 228, 230, 232, 234, 236, 238, 240, 242, 244, or 249.

[0190] d. Antibody Conjugates

[0191] The invention further provides antibody conjugates comprising a fusion protein disclosed herein. The antibody conjugate may comprise a single polypeptide chain (i.e., a fusion protein disclosed herein) or, the antibody conjugate may comprise additional polypeptide chains (e.g., one, two, or three additional polypeptide chains). For example, an antibody conjugate may comprise a first polypeptide (fusion protein) comprising a recombinant mutant human sialidase enzyme and an immunoglobulin heavy chain, and a second polypeptide comprising an immunoglobulin light chain, where, for example, the immunoglobulin heavy and light chains together define a single antigen-binding site.

[0192] In certain embodiments, the antibody conjugate can include a single sialidase. In other embodiments, the antibody conjugate can include more than one (e.g., two) sialidases. If more than one sialidase is included, the sialidases can be the same or different. In certain embodiments, the antibody conjugate can include a single antigen-binding site. In other embodiments, the antibody conjugate can include more than one (e.g., two) antigen-binding sites. If two antigen-binding sites are used, they can be the same or different. In certain embodiments, the antibody conjugate comprises an immunoglobulin Fc fragment.

[0193] In certain embodiments, the antibody conjugate comprises one or two immunoglobulin heavy chains, or a functional fragment thereof. In certain embodiments, the antibody conjugate comprises one or two immunoglobulin light chains, or a functional fragment thereof. In certain embodiments, the antibody conjugate comprises a sialidase fused to the N- or C-terminus of an immunoglobulin heavy chain or an immunoglobulin light chain.

[0194] FIG. 9 depicts exemplary antibody conjugate constructs containing one or more sialidase enzymes. For example, in FIG. 9A, a first antigen-binding site is depicted as 10, a second antigen-binding site is depicted as 20, a sialidase is depicted as 30, and a Fab is depicted as 40. In each of the constructs depicted in FIGS. 9A-9I it is understood that the Fc may optionally be modified in some manner, e.g. using Knobs-into-Holes type technology, e.g., as depicted by 50 in FIG. 9B. Throughout FIG. 9 similar structures are depicted by similar schematic representations.

[0195] FIG. 9A depicts antibody conjugate constructs comprising a first polypeptide comprising a first immunoglobulin light chain; a second polypeptide comprising a first immunoglobulin heavy chain; a third polypeptide comprising a second immunoglobulin heavy chain; and a fourth polypeptide comprising a second immunoglobulin light chain. The first and second polypeptides can be covalently linked together, the third and fourth polypeptides can be covalently linked together, and the second and third polypeptides can be covalently linked together. The covalent linkages can be disulfide bonds. In certain embodiments, the first polypeptide and the second polypeptide together define a first antigen-binding site as depicted as 10, and the third polypeptide and the fourth polypeptide together define a second antigen-binding site as depicted as 20. A sialidase enzyme as depicted as 30 can be conjugated to the N- or C-terminus of the first and second immunoglobulin light chain or the first and second immunoglobulin heavy chain.

[0196] FIG. 9B depicts antibody conjugate constructs comprising a first polypeptide comprising a first immunoglobulin light chain; a second polypeptide comprising a first immunoglobulin heavy chain; a third polypeptide comprising a second immunoglobulin heavy chain; and a fourth polypeptide comprising a second immunoglobulin light chain. The first and second polypeptides can be covalently linked together, the third and fourth polypeptides can be covalently linked together, and the second and third polypeptides can be covalently linked together. The covalent linkages can be disulfide bonds. In certain embodiments, the first polypeptide and the second polypeptide together define a first antigen-binding site, and the third polypeptide and the fourth polypeptide together define a second antigen-binding site. A sialidase enzyme can be conjugated to the N- or C-terminus of the first immunoglobulin light chain or the first immunoglobulin heavy chain.

[0197] FIG. 9C depicts antibody conjugate constructs comprising a first polypeptide comprising an immunoglobulin light chain; a second polypeptide comprising an immunoglobulin heavy chain; and a third polypeptide comprising an immunoglobulin Fc domain. The first and second polypeptides can be covalently linked together and the second and third polypeptides can be covalently linked together. The covalent linkages can be disulfide bonds. In certain embodiments, the first polypeptide and the second polypeptide together define an antigen-binding site. A sialidase enzyme can be conjugated to the N- or C-terminus of the first immunoglobulin light chain or the first immunoglobulin heavy chain.

[0198] FIG. 9D depicts antibody conjugate constructs comprising a first polypeptide comprising an immunoglobulin light chain; a second polypeptide comprising an immunoglobulin heavy chain; and a third polypeptide comprising an immunoglobulin Fc domain and a first sialidase enzyme. The first and second polypeptides can be covalently linked together and the second and third polypeptides can be covalently linked together. The covalent linkages can be disulfide bonds. The third polypeptide comprises the sialidase and the immunoglobulin Fc domain in an N- to C-terminal orientation. In certain embodiments, the first polypeptide and the second polypeptide together define an antigen-binding site. An optional second sialidase enzyme can be conjugated to the N- or C-terminus of the first immunoglobulin light chain or the first immunoglobulin heavy chain.

[0199] FIG. 9E depicts antibody conjugate constructs comprising a first polypeptide comprising an immunoglobulin light chain; a second polypeptide comprising an immunoglobulin heavy chain; and a third polypeptide comprising an immunoglobulin Fc domain and a first sialidase enzyme. The first and second polypeptides can be covalently linked together and the second and third polypeptides can be covalently linked together. The covalent linkages can be disulfide bonds. The third polypeptide comprises the immunoglobulin Fc domain and the sialidase in an N- to C-terminal orientation. In certain embodiments, the first polypeptide and the second polypeptide together define an antigen-binding site. An optional second sialidase enzyme can be conjugated to the N- or C-terminus of the first immunoglobulin light chain or the first immunoglobulin heavy chain.

[0200] FIG. 9F depicts antibody conjugate constructs comprising a first polypeptide comprising a first immunoglobulin Fc domain, and a second polypeptide comprising a second immunoglobulin Fc domain. The first and second polypeptides can be covalently linked together. The covalent linkages can be disulfide bonds. A sialidase enzyme can be conjugated to the N- or C-terminus of the first immunoglobulin Fc domain or to the N- or C-terminus of the second immunoglobulin Fc domain. An optional second sialidase enzyme can be conjugated to the N- or C-terminus of the first immunoglobulin Fc domain or to the N- or C-terminus of the second immunoglobulin Fc domain.

[0201] FIG. 9G depicts antibody conjugate constructs comprising a first polypeptide comprising an immunoglobulin light chain; and a second polypeptide comprising an immunoglobulin heavy chain variable region. The first and second polypeptides can be covalently linked together. The covalent linkages can be disulfide bonds. In certain embodiments, the first polypeptide and the second polypeptide together define an antigen-binding site. The sialidase enzyme can be conjugated to the N- or C-terminus of the immunoglobulin light chain or the immunoglobulin heavy chain variable region.

[0202] FIG. 9H depicts antibody conjugate constructs comprising a first polypeptide comprising a first immunoglobulin Fc domain, and a second polypeptide comprising a second immunoglobulin Fc domain. The first and second polypeptides can be covalently linked together. The covalent linkages can be disulfide bonds. A sialidase enzyme can be conjugated to the N-terminus of the first immunoglobulin Fc domain or the second immunoglobulin Fc domain. An optional second sialidase enzyme can be conjugated to the N-terminus of the second immunoglobulin Fc domain or the first immunoglobulin Fc domain, respectively. A single chain variable fragment (scFv) can be conjugated to the C-terminus of the first immunoglobulin Fc domain or the second immunoglobulin Fc domain. An optional second single chain variable fragment (scFv) can be conjugated to the C-terminus of the first immunoglobulin Fc domain or the second immunoglobulin Fc domain, respectively.

[0203] FIG. 9I depicts antibody conjugate constructs similar to those depicted in FIG. 9H except that each scFv is replaced with an immunoglobulin antigen binding fragment, e.g., a Fab. For example, FIG. 9I depicts antibody conjugate constructs comprising a first polypeptide comprising a first immunoglobulin Fc domain, and a second polypeptide comprising a second immunoglobulin Fc domain. The first and second polypeptides can be covalently linked together. The covalent linkages can be disulfide bonds. A sialidase enzyme can be conjugated to the N-terminus of the first immunoglobulin Fc domain or the second immunoglobulin Fc domain. An optional second sialidase enzyme can be conjugated to the N-terminus of the second immunoglobulin Fc domain or the first immunoglobulin Fc domain, respectively. An antibody fragment (Fab) can be conjugated or fused to the C-terminus of the first immunoglobulin Fc domain or the second immunoglobulin Fc domain. An optional second antibody fragment (Fab) can be conjugated or fused to the C-terminus of the second immunoglobulin Fc domain or the first immunoglobulin Fc domain, respectively. In the case of a fusion, the C terminus of the Fc domain is linked (either by a bond or an amino acid linker) to a first polypeptide chain defining an immunoglobulin antigen binding fragment. In the case of antibodies that have an antigen binding site defined by a single variable region, then this may be sufficient to impart binding affinity to a target antigen. In other instances, e.g., in the case of a human antibody, the first polypeptide chain defining an immunoglobulin antigen binding fragment can be conjugated (e.g., covalently conjugated, e.g., via a disulfide bond) to a second polypeptide chain defining an immunoglobulin antigen binding fragment, there the two antigen binding fragments together define an antigen binding site for binding the target antigen.

[0204] FIG. 10 depicts additional antibody conjugate constructs. For example, FIG. 10 depicts an antibody conjugate construct comprising a first polypeptide comprising an immunoglobulin light chain; a second polypeptide comprising an immunoglobulin heavy chain and an scFv; and a third polypeptide comprising an immunoglobulin Fc domain and a first sialidase enzyme. The first and second polypeptides can be covalently linked together and the second and third polypeptides can be covalently linked together. The covalent linkages can be disulfide bonds. The second polypeptide comprises the heavy chain and the scFv in an N- to C-terminal orientation. The third polypeptide comprises the sialidase and the immunoglobulin Fc domain in an N- to C-terminal orientation. In certain embodiments, the first polypeptide and the second polypeptide together define a first antigen-binding site. In certain embodiments, the scFv defines a second antigen-binding site. FIG. 10 depicts an additional antibody construct comprising a first polypeptide comprising an immunoglobulin light chain; a second polypeptide comprising an immunoglobulin heavy chain; and a third polypeptide comprising an immunoglobulin Fc domain and a first sialidase enzyme, wherein a Fab fragment is conjugated to the N-terminus of the immunoglobulin heavy chain. The first and second polypeptides can be covalently linked together and the second and third polypeptides can be covalently linked together. The covalent linkages can be disulfide bonds. The third polypeptide comprises the sialidase and the immunoglobulin Fc domain in an N- to C-terminal orientation. In certain embodiments, the first polypeptide and the second polypeptide together define a first antigen-binding site. In certain embodiments, the Fab fragment defines a second antigen-binding site. In each of the constructs depicted in FIG. 10 it is understood that an scFv, when present, may be replaced with a Fab fragment, or a Fab fragment, when present, may be replaced with an scFv. In each of the constructs depicted in FIG. 10, it is understood that the Fc may optionally be modified in some manner.

[0205] In certain embodiments, the antibody conjugate comprises a first polypeptide comprising a first immunoglobulin light chain; a second polypeptide comprising a first immunoglobulin heavy chain and a first sialidase; a third polypeptide comprising a second immunoglobulin heavy chain and a second sialidase; and a fourth polypeptide comprising a second immunoglobulin light chain. An example of this embodiment is shown in FIG. 11A. The first and second polypeptides can be covalently linked together, the third and fourth polypeptides can be covalently linked together, and the second and third polypeptides can be covalently linked together. The covalent linkages can be disulfide bonds. In certain embodiments, the first polypeptide and the second polypeptide together define a first antigen-binding site, and the third polypeptide and the fourth polypeptide together define a second antigen-binding site. In certain embodiments, the second and third polypeptides comprise the first and second immunoglobulin heavy chain and the first and second sialidase, respectively, in an N- to C-terminal orientation. In certain embodiments, the second and third polypeptides comprise the first and second sialidase and the first and second immunoglobulin heavy chain, respectively, in an N- to C-terminal orientation.

[0206] In certain embodiments, the antibody conjugate comprises a first polypeptide comprising an immunoglobulin light chain; a second polypeptide comprising an immunoglobulin heavy chain; and a third polypeptide comprising an immunoglobulin Fc domain and a sialidase. An example of this embodiment is shown in FIG. 11B. The first and second polypeptides can be covalently linked together and the second and third polypeptides can be covalently linked together. The covalent linkages can be disulfide bonds. In certain embodiments, the first polypeptide and the second polypeptide together define an antigen-binding site. In certain embodiments, the third polypeptide comprises the sialidase and the immunoglobulin Fc domain in an N- to C-terminal orientation, or the immunoglobulin Fc domain and the sialidase in an N- to C-terminal orientation.

[0207] In certain embodiments, the first polypeptide comprises the amino acid sequence of SEQ ID NO: 66, or an amino acid sequence that has at least 85%, 90%, 95%, 96%, 97%, 98%, or 99% sequence identity to SEQ ID NO: 66. In certain embodiments, the second polypeptide comprises the amino acid sequence of SEQ ID NO: 67 or 189 or an amino acid sequence that has at least 85%, 90%, 95%, 96%, 97%, 98%, or 99% sequence identity to SEQ ID NO: 67 or 189. In certain embodiments, the third polypeptide comprises the amino acid sequence of any one of SEQ ID NOs: 68-74, 98-112, 150, 151, 155, 156, 160, 161, 185, 187, 192, 195, 203-208, or an amino acid sequence that has at least 85%, 90%, 95%, 96%, 97%, 98%, or 99% sequence identity to any one of SEQ ID NOs: 68-74, 98-112, 150, 151, 155, 156, 160, 161, 185, 187, 192, 195, or 203-208.

[0208] In certain embodiments, the third polypeptide comprises the amino acid sequence of

(SEQ ID NO: 201)
X₁X₂SX₃X₄X₅LQX₆ESVFQSGAHAYRIPALLYLPGQQSLLAFAEQRX₇SX₈
X₉DEHAELIVX₁₀RRGDYDAX₁₁THQVQWX₁₂AQEVVAQAX₁₃LX₁₄GHRSMN
PCPLYDX₁₅QTGTLFLFFIAIPX₁₆X₁₇VTEX₁₈QQLQTRANVTRLX₁₉X₂₀V
TSTDHGRTWSSPRDLTDAAIGPX₂₁YREWSTFAVGPGHX₂₂LQLHDX₂₃X₂₄
RSLVVPAYAYRKLHPX₂₅X₂₆X₂₇PIPSAFX₂₈FLSHDHGRTWARGHFVX₂₉
QDTX₃₀ECQVAEVX₃₁TGEQRVVTLNARSX₃₂X₃₃X₃₄X₃₅RX₃₆QAQSX₃₇NX₃₈
GLDFQX₃₉X₄₀QX₄₁VKKLX₄₂EPPPX₄₃GX₄₄QGSVISFPSPRSGPGSPAQX₄₅
LLYTHPTHX₄₆X₄₇QRADLGAYLNPRPPAPEAWSEPX₄₈LLAKGSX₄₉AYSDL
QSMGTGPDGSPLFGX₅₀LYEANDYEEIX₅₁FX₅₂MFTLKQAFPAEYLPQX₅₃D
KTHTCPPCPAPELLGGPSVFLFPPKPKDTLMISRTPEVTCVVVDVSHEDP
EVKFNWYVDGVEVHNAKTKPREEQYNSTYRVVSVLTVLHQDWLNGKEYKC
KVSNKALPAPIEKTISKAKGQPREPQVYTLPPSREEMTKNQVSLTCLVKG
FYPSDIAVEWESNGQPENNYKTTPPVLDSDGSFFLTSKLTVDKSRWQQGN
VFSCSVMHEALHNHYTQKSLSLSPGK,

wherein X₁ is Ala, Arg, Asn, Asp, Gln, Glu, Gly, His, Leu, Lys, Met, Phe, Thr, Val, or not present, X₂ is Ala or Lys, X₃ is Asn or Leu, X₄ is Pro or His, X₅ is Phe, Trp, Tyr or Val, X₆ is Lys or Asp, X₇ is Ala or Arg, X₈ is Lys, Arg, or Glu, X₉ is Lys, Ala, Arg, or Glu, X₁₀ is Leu or Met, X₁₁ is Pro, Asn, Asp, His, Glu, Gly, Ser or Thr, X₁₂ is Gln or His, X₁₃ is Arg or Lys, X₁₄ is Asp or Pro, X₁₅ is Ala, Glu or Lys, X₁₆ is Gly or Asp, X₁₇ is Gln or His, X₁₈ is Gln, Arg, or Lys, X₁₉ is Ala, Cys, Ile, Ser, Val, or Leu, X₂₀ is Gln, Leu, Glu, Phe, His, Ile, Leu, or Tyr, X₂₁ is Ala or Val, X₂₂ is Cys or Gly, X₂₃ is Arg or Pro, X₂₄ is Ala or Gly, X₂₅ is Arg, Ile, or Lys, X₂₆ is Gln or Pro, X₂₇ is Arg or Pro, X₂₈ is Ala, Cys, Leu, or Val, X₂₉ is Ala, Cys, Asn, Ser, or Thr, X₃₀ is Leu, Ala, or Val, X₃₁ is Glu or Pro, X₃₂ is His or Pro, X₃₃ is Leu, Asp, Asn, or Tyr, X₃₄ is Arg, Ala, Asp, Leu, Gln, or Tyr, X₃₅ is Ala, Cys, Phe, Gly, His, Ile, Lys, Leu, Met, Asn, Gln, Arg, Ser, Val, Trp, or Tyr, X₃₆ is Val, Ile, or Lys, X₃₇ is Thr or Ala, X₃₈ is Asp or Gly, X₃₉ is Glu, Lys, or Pro, X₄₀ is Ser or Cys, X₄₁ is Leu, Asp, Phe, Gln, or Thr, X₄₂ is Val or Phe, X₄₃ is Gln, Ala, His, Phe, Pro, Ser, or Thr, X₄₄ is Cys or Val, X₄₅ is Trp or Arg, X₄₆ is Ser, Arg, Ala, Asp, Glu, Phe, Gly, His, Ile, Lys, Leu, Met, Asn, Pro, Gln, Thr, Val, Trp, or Tyr, X₄₇ is Trp, Lys, Ala, Asp, Glu, Phe, Gly, His, Ile, Lys, Leu, Met, Asn, Pro, Gln, Arg, Ser, Thr, Val, or Tyr, X₄₈ is Lys or Val, X₄₉ is Ala, Cys, Ser, or Val, X₅₀ is Cys, Leu, or Val, X₅₁ is Val or Arg, X₅₂ is Leu, Gln, His, Ile, Lys, or Ser, and X₅₃ is GGGGS (SEQ ID NO: 184), GGGGSGGGGS (SEQ ID NO: 145), or EPKSS (SEQ ID NO: 146), and the sialidase comprises at least one mutation relative to wild-type human Neu2 (SEQ ID NO: 1).

[0209] In certain embodiments, the third polypeptide comprises the amino acid sequence of

(SEQ ID NO: 202)
X₁ASLPX₂LQX₃ESVFQSGAHAYRIPALLYLPGQQSLLAFAEQRX₄SKKDE
HAELIVLRRGDYDAX₅THQVQWQAQEVVAQARLDGHRSMNPCPLYDX₆QT
GTLFLFFIAIPGQVTEQQQLQTRANVTRLCX₇VTSTDHGRTWSSPRDLTD
AAIGPAYREWSTFAVGPGHCLQLHDRARSLVVPAYAYRKLHPX₈QRPIPS
AFCFLSHDHGRTWARGHFVAQDTLECQVAEVETGEQRVVTLNARSHLRX₉
RVQAQSTNDGLDFQESQLVKKLVEPPPX₁₀GCQGSVISFPSPRSGPGSPA
QWLLYTHPTHX₁₁X₁₂QRADLGAYLNPRPPAPEAWSEPVLLAKGSX₁₃AYS
DLQSMGTGPDGSPLFGCLYEANDYEEIX₁₄FX₁₅MFTLKQAFPAEYLPQX₁₆
DKTHTCPPCPAPELLGGPSVFLFPPKPKDTLMISRTPEVTCVVVDVSHE
DPEVKFNWYVDGVEVHNAKTKPREEQYNSTYRVVSVLTVLHQDWLNGKE
YKCKVSNKALPAPIEKTISKAKGQPREPQVYTLPPSREEMTKNQVSLTC
LVKGFYPSDIAVEWESNGQPENNYKTTPPVLDSDGSFFLTSKLTVDKSR
WQQGNVFSCSVMHEALHNHYTQKSLSLSPGK,

wherein X₁ is Ala, Arg, Asn, Asp, Gln, Glu, Gly, His, Leu, Lys, Met, Phe, Thr, Val, or not present, X₂ is Phe, Trp, Tyr or Val, X₃ is Lys or Asp, X₄ is Arg or Ala, X₅ is Pro, Asn, Asp, His, Glu, Gly, Ser or Thr, X₆ is Ala, Glu, or Lys, X₇ is Gln, Leu, Glu, Phe, His, Ile, Leu, or Tyr, X₈ is Arg, Ile, or Lys, X₉ is Ala, Cys, Phe, Gly, His, Ile, Lys, Leu, Met, Asn, Gln, Arg, Ser, Val, Trp, or Tyr, X₁₀ is Gln, Ala, His, Phe, Pro, Ser, or Thr, X₁₁ is Ser, Arg, Ala, Asp, Glu, Phe, Gly, His, Ile, Lys, Leu, Met, Asn, Pro, Gln, Thr, Val, Trp, or Tyr, X₁₂ is Trp, Lys, Ala, Asp, Glu, Phe, Gly, His, Ile, Lys, Leu, Met, Asn, Pro, Gln, Arg, Ser, Thr, Val, or Tyr, X₁₃ is Ala, Cys, Ser, or Val, X₁₄ is Val or Arg, X₁₅ is Leu, Gln, His, Ile, Lys, or Ser, and X₁₆ is GGGGS (SEQ ID NO: 184), GGGGSGGGGS (SEQ ID NO: 145), or EPKSS (SEQ ID NO: 146), and the sialidase comprises at least one mutation relative to wild-type human Neu2 (SEQ ID NO: 1). In certain embodiments, X₁ is Ala, Asp, Met, or not present, X₂ is Tyr or Val, X₃ is Lys or Asp, X₄ is Arg or Ala, X₅ is Pro, Asn, Gly, Ser or Thr, X₆ is Ala or Glu, X₇ is Gln or Tyr, X₈ is Ile or Lys, X₉ is Ala or Thr, X₁₀ is Gln, Ala, or Thr, X₁₁ is Ser, Arg, or Ala, X₁₂ is Trp, Lys, or Arg, X₁₃ is Ala or Cys, X₁₄ is Val or Arg, and X₁₅ is Leu or Ile.

[0210] In certain embodiments, the third polypeptide comprises the amino acid sequence of

(SEQ ID NO: 76)
X₁X₂SX₃X₄X₅LQX₆ESVFQSGAHAYRIPALLYLPGQQSLLAFAEQRASX₇
X₈DEHAELIVX₉RRGDYDAX₁₀THQVQWX₁₁AQEVVAQAX₁₂LDGHRSMNPC
PLYDX₁₃QTGTLFLFFIAIPX₁₄X₁₅VTEX₁₆QQLQTRANVTRLX₁₇X₁₈VTS
TDHGRTWSSPRDLTDAAIGPX₁₉YREWSTFAVGPGHX₂₀LQLHDRX₂₁RSL
VVPAYAYRKLHPX₂₂QRPIPSAFX₂₃FLSHDHGRTWARGHFVAQDTX₂₄E
CQVAEVETGEQRVVTLNARSHLRARVQAQSX₂₅NX₂₆GLDFQX₂₇SQLVK
KLVEPPPX₂₈GX₂₉QGSVISFPSPRSGPGSPAQX₃₀LLYTHPTHX₃₁X₃₂Q
RADLGAYLNPRPPAPEAWSEPX₃₃LLAKGSX₃₄AYSDLQSMGTGPDGSP
LFGX₃₅LYEANDYEEIX₃₆FX₃₇MFTLKQAFPAEYLPQGGGGSGGGGSDKT
HTCPPCPAPELLGGPSVFLFPPKPKDTLMISRTPEVTCVVVDVSHEDPE
VKFNWYVDGVEVHNAKTKPREEQYNSTYRVVSVLTVLHQDWLNGKEYKC
KVSNKALPAPIEKTISKAKGQPREPQVYTLPPSREEMTKNQVSLTCLVK
GFYPSDIAVEWESNGQPENNYKTTPPVLDSDGSFFLTSKLTVDKSRWQQ
GNVFSCSVMHEALHNHYTQKSLSLSPGK,

wherein X₁ is Ala, Arg, Asn, Asp, Gln, Glu, Gly, His, Leu, Lys, Met, Phe, Thr, Val, or not present, X₂ is Ala or Lys, X₃ is Asn or Leu, X₄ is Pro or His, X₅ is Phe, Trp, Tyr or Val, X₆ is Lys or Asp; X₇ is Lys, Arg, or Glu. X₈ is Lys, Ala, Arg, or Glu, X₉ is Leu or Met, X₁₀ is Pro, Asn, Asp, His, Glu, Gly, Ser or Thr, X₁₁ is Gln or His, X₁₂ is Arg or Lys, X₁₃ is Ala, Glu or Lys, X₁₄ is Gly or Asp, X₁₅ is Gln or His, X₁₆ is Gln, Arg, or Lys, X₁₇ is Ala, Cys, Ile, Ser, Val, or Leu, X₁₈ is Gln or Leu, X₁₉ is Ala or Val, X₂₀ is Cys or Gly, X₂₁ is Ala or Gly, X₂₂ is Arg, Ile, or Lys, X₂₃ is Ala, Cys, Leu, or Val, X₂₄ is Leu, Ala, or Val, X₂s is Thr or Ala, X₂₆ is Asp or Gly, X₂₇ is Glu or Lys, X₂₈ is Gln, Ala, His, Phe, or Pro, X₂₉ is Cys or Val, X₃₀ is Trp or Arg, X₃₁ is Ser or Arg, X₃₂ is Trp or Lys, X₃₃ is Lys or Val, X₃₄ is Ala, Cys, Ser, or Val, X₃₅ is Cys, Leu, or Val, X₃₆ is Val or Arg, and X₃₇ is Leu, Gln, His, Ile, Lys, or Ser, and the sialidase comprises at least one mutation relative to wild-type human Neu2 (SEQ ID NO: 1).

[0211] In certain embodiments, the third polypeptide comprises the amino acid sequence of

(SEQ ID NO: 75)
X₁ASLPX₂LQX₃ESVFQSGAHAYRIPALLYLPGQQSLLAFAEQRASKKDE
HAELIVLRRGDYDAX₄THQVQWQAQEVVAQARLDGHRSMNPCPLYDX₅QT
GTLFLFFIAIPGQVTEQQQLQTRANVTRLCQVTSTDHGRTWSSPRDLTD
AAIGPAYREWSTFAVGPGHCLQLHDRARSLVVPAYAYRKLHPX₆QRPIP
SAFCFLSHDHGRTWARGHFVAQDTLECQVAEVETGEQRVVTLNARSHLR
ARVQAQSTNDGLDFQESQLVKKLVEPPPX₇GCQGSVISFPSPRSGPGSP
AQWLLYTHPTHX₈X₉QRADLGAYLNPRPPAPEAWSEPVLLAKGSX₁₀AYS
DLQSMGTGPDGSPLFGCLYEANDYEEIX₁₁FX₁₂MFTLKQAFPAEYLPQG
GGGSGGGGSDKTHTCPPCPAPELLGGPSVFLFPPKPKDTLMISRTPEV
TCVVVDVSHEDPEVKFNWYVDGVEVHNAKTKPREEQYNSTYRVVSVLT
VLHQDWLNGKEYKCKVSNKALPAPIEKTISKAKGQPREPQVYTLPPSR
EEMTKNQVSLTCLVKGFYPSDIAVEWESNGQPENNYKTTPPVLDSDGS
FFLTSKLTVDKSRWQQGNVFSCSVMHEALHNHYTQKSLSLSPGK,

wherein X₁ is Ala, Arg, Asn, Asp, Gln, Glu, Gly, His, Leu, Lys, Met, Phe, Thr, Val, or not present, X₂ is Phe, Trp, Tyr or Val, X₃ is Lys or Asp, X₄ is Pro, Asn, Asp, His, Glu, Gly, Ser or Thr, X₅ is Ala, Glu, or Lys, X₆ is Arg, Ile, or Lys, X₇ is Gln, Ala, His, Phe, or Pro, X₈ is Ser or Arg, X₉ is Trp or Lys, X₁₀ is Ala, Cys, Ser, or Val, X₁₁ is Val or Arg, and X₁₂ is Leu, Gln, His, Ile, Lys, or Ser, and the sialidase comprises at least one mutation relative to wild-type human Neu2 (SEQ ID NO: 1). In certain embodiments, X₁ is Ala, Asp, Met, or not present, X₂ is Tyr or Val, X₃ is Lys or Asp, X₄ is Pro, Asn, Gly, Ser or Thr, X₅ is Ala or Glu, X₆ is Ile or Lys, X₇ is Gln or Ala, X₈ is Ser or Arg, X₉ is Trp or Lys, X₁₀ is Ala or Cys, X₁₁ is Val or Arg, and X₁₂ is Leu or Ile.

[0212] In certain embodiments, the third polypeptide comprises the amino acid sequence of

(SEQ ID NO: 144)
X₁X₂SX₃X₄X₅LQX₆ESVFQSGAHAYRIPALLYLPGQQSLLAFAEQRASX₇
X₈DEHAELIVX₉RRGDYDAX₁₀THQVQWX₁₁AQEVVAQAX₁₂LDGHRSMNPC
PLYDX₁₃QTGTLFLFFIAIPX₁₄X₁₅VTEX₁₆QQLQTRANVTRLX₁₇X₁₈VTS
TDHGRTWSSPRDLTDAAIGPX₁₉YREWSTFAVGPGHX₂₀LQLHDRX₂₁RSL
VVPAYAYRKLHPX₂₂QRPIPSAFX₂₃FLSHDHGRTWARGHFVAQDTX₂₄EC
QVAEVETGEQRVVTLNARSHLRARVQAQSX₂₅NX₂₆GLDFQX₂₇SQLVKKL
VEPPPX₂₈GX₂₉QGSVISFPSPRSGPGSPAQX₃₀LLYTHPTHX₃₁X₃₂QRADL
GAYLNPRPPAPEAWSEPX₃₃LLAKGSX₃₄AYSDLQSMGTGPDGSPLFGX₃₅
LYEANDYEEIX₃₆FX₃₇MFTLKQAFPAEYLPQX₃₈DKTHTCPPCPAPELLG
GPSVFLFPPKPKDTLMISRTPEVTCVVVDVSHEDPEVKFNWYVDGVEVH
NAKTKPREEQYNSTYRVVSVLTVLHQDWLNGKEYKCKVSNKALPAPIEK
TISKAKGQPREPQVYTLPPSREEMTKNQVSLTCLVKGFYPSDIAVEWES
NGQPENNYKTTPPVLDSDGSFFLTSKLTVDKSRWQQGNVFSCSVMHEAL
HNHYTQKSLSLSPGK,

wherein X₁ is Ala, Arg, Asn, Asp, Gln, Glu, Gly, His, Leu, Lys, Met, Phe, Thr, Val, or not present, X₂ is Ala or Lys, X₃ is Asn or Leu, X₄ is Pro or His, X₅ is Phe, Trp, Tyr or Val, X₆ is Lys or Asp; X₇ is Lys, Arg, or Glu. X₈ is Lys, Ala, Arg, or Glu, X₉ is Leu or Met, X₁₀ is Pro, Asn, Asp, His, Glu, Gly, Ser or Thr, X₁₁ is Gln or His, X₁₂ is Arg or Lys, X₁₃ is Ala, Glu or Lys, X₁₄ is Gly or Asp, X₁₅ is Gln or His, X₁₆ is Gln, Arg, or Lys, X₁₇ is Ala, Cys, Ile, Ser, Val, or Leu, X₁₈ is Gln or Leu, X₁₉ is Ala or Val, X₂₀ is Cys or Gly, X₂₁ is Ala or Gly, X₂₂ is Arg, Ile, or Lys, X₂₃ is Ala, Cys, Leu, or Val, X₂₄ is Leu, Ala, or Val, X₂₅ is Thr or Ala, X₂₆ is Asp or Gly, X₂₇ is Glu or Lys, X₂₈ is Gln, Ala, His, Phe, or Pro, X₂₉ is Cys or Val, X₃₀ is Trp or Arg, X₃₁ is Ser or Arg, X₃₂ is Trp or Lys, X₃₃ is Lys or Val, X₃₄ is Ala, Cys, Ser, or Val, X₃₅ is Cys, Leu, or Val, X₃₆ is Val or Arg, X₃₇ is Leu, Gln, His, Ile, Lys, or Ser, X₃₈ is GGGGSGGGGS (SEQ ID NO: 145) or EPKSS (SEQ ID NO: 146), and the sialidase comprises at least one mutation relative to wild-type human Neu2 (SEQ ID NO: 1).

[0213] In certain embodiments, the third polypeptide comprises the amino acid sequence of

(SEQ ID NO: 143)
X₁ASLPX₂LQX₃ESVFQSGAHAYRIPALLYLPGQQSLLAFAEQRASKKDE
HAELIVLRRGDYDAX₄THQVQWQAQEVVAQARLDGHRSMNPCPLYDX₅QT
GTLFLFFIAIPGQVTEQQQLQTRANVTRLCQVTSTDHGRTWSSPRDLTD
AAIGPAYREWSTFAVGPGHCLQLHDRARSLVVPAYAYRKLHPX₆QRPIP
SAFCFLSHDHGRTWARGHFVAQDTLECQVAEVETGEQRVVTLNARSHLR
ARVQAQSTNDGLDFQESQLVKKLVEPPPX₇GCQGSVISFPSPRSGPGSP
AQWLLYTHPTHX₈X₉QRADLGAYLNPRPPAPEAWSEPVLLAKGSX₁₀AYS
DLQSMGTGPDGSPLFGCLYEANDYEEIX₁₁FX₁₂MFTLKQAFPAEYLPQ
X₁₃DKTHTCPPCPAPELLGGPSVFLFPPKPKDTLMISRTPEVTCVVV
DVSHEDPEVKFNWYVDGVEVHNAKTKPREEQYNSTYRVVSVLTVLHQDW
LNGKEYKCKVSNKALPAPIEKTISKAKGQPREPQVYTLPPSREEMTKNQ
VSLTCLVKGFYPSDIAVEWESNGQPENNYKTTPPVLDSDGSFFLTSKLT
VDKSRWQQGNVFSCSVMHEALHNHYTQKSLSLSPGK,

wherein X₁ is Ala, Arg, Asn, Asp, Gln, Glu, Gly, His, Leu, Lys, Met, Phe, Thr, Val, or not present, X₂ is Phe, Trp, Tyr or Val, X₃ is Lys or Asp, X₄ is Pro, Asn, Asp, His, Glu, Gly, Ser or Thr, X₅ is Ala, Glu, or Lys, X₆ is Arg, Ile, or Lys, X₇ is Gln, Ala, His, Phe, or Pro, X₈ is Ser or Arg, X₉ is Trp or Lys, X₁₀ is Ala, Cys, Ser, or Val, X₁₁ is Val or Arg, X₁₂ is Leu, Gln, His, Ile, Lys, or Ser, and X₁₃ is GGGGSGGGGS (SEQ ID NO: 145) or EPKSS (SEQ ID NO: 146), and the sialidase comprises at least one mutation relative to wild-type human Neu2 (SEQ ID NO: 1). In certain embodiments, X₁ is Ala, Asp, Met, or not present, X₂ is Tyr or Val, X₃ is Lys or Asp, X₄ is Pro, Asn, Gly, Ser or Thr, X₅ is Ala or Glu, X₆ is Ile or Lys, X₇ is Gln or Ala, X₈ is Ser or Arg, X₉ is Trp or Lys, X₁₀ is Ala or Cys, X₁₁ is Val or Arg, and X₁₂ is Leu or Ile.

[0214] In certain embodiments, the third polypeptide comprises the amino acid sequence of

(SEQ ID NO: 165)
X₁X₂SX₃X₄X₅LQX₆ESVFQSGAHAYRIPALLYLPGQQSLLAFAEQRASX₇
X₈DEHAELIVX₉RRGDYDAX₁₀THQVQWX₁₁AQEVVAQAX₁₂LX₁₃GHRSMNP
CPLYDX₁₄QTGTLFLFFIAIPX₁₅X₁₆VTEX₁₇QQLQTRANVTRLX₁₈X₁₉VTS
TDHGRTWSSPRDLTDAAIGPX₂₀YREWSTFAVGPGHX₂₁LQLHDX₂₂X₂₃RS
LVVPAYAYRKLHPX₂₄X₂₅X₂₆PIPSAFX₂₇FLSHDHGRTWARGHFVX₂₈QDT
X₂₉ECQVAEVX₃₀TGEQRVVTLNARSX₃₁X₃₂X₃₃X₃₄RX₃₅QAQSX₃₆NX₃₇GLD
FQX₃₈X₃₉QX₄₀VKKLX₄₁EPPPX₄₂GX₄₃QGSVISFPSPRSGPGSPAQX₄₄LLY
THPTHX₄₅X₄₆QRADLGAYLNPRPPAPEAWSEPX₄₇LLAKGSX₄₈AYSDLQSM
GTGPDGSPLFGX₄₉LYEANDYEEIX₅₀FX₅₁MFTLKQAFPAEYLPQX₅₂DKTH
TCPPCPAPELLGGPSVFLFPPKPKDTLMISRTPEVTCVVVDVSHEDPEVK
FNWYVDGVEVHNAKTKPREEQYNSTYRVVSVLTVLHQDWLNGKEYKCKVS
NKALPAPIEKTISKAKGQPREPQVYTLPPSREEMTKNQVSLTCLVKGFYP
SDIAVEWESNGQPENNYKTTPPVLDSDGSFFLTSKLTVDKSRWQQGNVFS
CSVMHEALHNHYTQKSLSLSPGK,

wherein X₁ is Ala, Arg, Asn, Asp, Gln, Glu, Gly, His, Leu, Lys, Met, Phe, Thr, Val, or not present, X₂ is Ala or Lys, X₃ is Asn or Leu, X₄ is Pro or His, X₅ is Phe, Trp, Tyr or Val, X₆ is Lys or Asp, X₇ is Lys, Arg, or Glu, X₈ is Lys, Ala, Arg, or Glu, X₉ is Leu or Met, X₁₀ is Pro, Asn, Asp, His, Glu, Gly, Ser or Thr, X₁₁ is Gln or His, X₁₂ is Arg or Lys, X₁₃ is Asp or Pro, X₁₄ is Ala, Glu or Lys, X₁₅ is Gly or Asp, X₁₆ is Gln or His, X₁₇ is Gln, Arg, or Lys, X₁₈ is Ala, Cys, Ile, Ser, Val, or Leu, X₁₉ is Gln, Leu, Glu, Phe, His, Ile, Leu, or Tyr, X₂₀ is Ala or Val, X₂₁ is Cys or Gly, X₂₂ is Arg or Pro, X₂₃ is Ala or Gly, X₂₄ is Arg, Ile, or Lys, X₂₅ is Gln or Pro, X₂₆ is Arg or Pro, X₂₇ is Ala, Cys, Leu, or Val, X₂₈ is Ala, Cys, Asn, Ser, or Thr, X₂₉ is Leu, Ala, or Val, X₃₀ is Glu or Pro, X₃₁ is His or Pro, X₃₂ is Leu, Asp, Asn, or Tyr, X₃₃ is Arg, Ala, Asp, Leu, Gln, or Tyr, X₃₄ is Ala, Cys, Phe, Gly, His, Ile, Lys, Leu, Met, Asn, Gln, Arg, Ser, Val, Trp, or Tyr, X₃₅ is Val, Ile, or Lys, X₃₆ is Thr or Ala, X₃₇ is Asp or Gly, X₃₈ is Glu, Lys, or Pro, X₃₉ is Ser or Cys, X₄₀ is Leu, Asp, Phe, Gln, or Thr, X₄₁ is Val or Phe, X₄₂ is Gln, Ala, His, Phe, Pro, Ser, or Thr, X₄₃ is Cys or Val, X₄₄ is Trp or Arg, X₄₅ is Ser, Arg, Ala, Asp, Glu, Phe, Gly, His, Ile, Lys, Leu, Met, Asn, Pro, Gln, Thr, Val, Trp, or Tyr, X₄₆ is Trp, Lys, Ala, Asp, Glu, Phe, Gly, His, Ile, Lys, Leu, Met, Asn, Pro, Gln, Arg, Ser, Thr, Val, or Tyr, X₄₇ is Lys or Val, X₄₈ is Ala, Cys, Ser, or Val, X₄₉ is Cys, Leu, or Val, X₅₀ is Val or Arg, X₅₁ is Leu, Gln, His, Ile, Lys, or Ser, X₅₂ is GGGGS (SEQ ID NO: 184), GGGGSGGGGS (SEQ ID NO: 145), or EPKSS (SEQ ID NO: 146), and the sialidase comprises at least one mutation relative to wild-type human Neu2 (SEQ ID NO: 1).

[0215] In certain embodiments, the third polypeptide comprises the amino acid sequence of

(SEQ ID NO: 164)
X₁ASLPX₂LQX₃ESVFQSGAHAYRIPALLYLPGQQSLLAFAEQRASKKDE
HAELIVLRRGDYDAX₄THQVQWQAQEVVAQARLDGHRSMNPCPLYDX₅QT
GTLFLFFIAIPGQVTEQQQLQTRANVTRLCX₆VTSTDHGRTWSSPRDLTD
AAIGPAYREWSTFAVGPGHCLQLHDRARSLVVPAYAYRKLHPX₇QRPIPS
AFCFLSHDHGRTWARGHFVAQDTLECQVAEVETGEQRVVTLNARSHLRX₈
RVQAQSTNDGLDFQESQLVKKLVEPPPX₉GCQGSVISFPSPRSGPGSPA
QWLLYTHPTHX₁₀X₁₁QRADLGAYLNPRPPAPEAWSEPVLLAKGSX₁₂AYSD
LQSMGTGPDGSPLFGCLYEANDYEEIX₁₃FX₁₄MFTLKQAFPAEYLPQX₁₅D
KTHTCPPCPAPELLGGPSVFLFPPKPKDTLMISRTPEVTCVVVDVSHEDP
EVKFNWYVDGVEVHNAKTKPREEQYNSTYRVVSVLTVLHQDWLNGKEYKC
KVSNKALPAPIEKTISKAKGQPREPQVYTLPPSREEMTKNQVSLTCLVKG
FYPSDIAVEWESNGQPENNYKTTPPVLDSDGSFFLTSKLTVDKSRWQQGN
VFSCSVMHEALHNHYTQKSLSLSPGK,

wherein X₁ is Ala, Arg, Asn, Asp, Gln, Glu, Gly, His, Leu, Lys, Met, Phe, Thr, Val, or not present, X₂ is Phe, Trp, Tyr or Val, X₃ is Lys or Asp, X₄ is Pro, Asn, Asp, His, Glu, Gly, Ser or Thr, X₅ is Ala, Glu, or Lys, X₆ is Gln, Leu, Glu, Phe, His, Ile, Leu, or Tyr, X₇ is Arg, Ile, or Lys, X₈ is Ala, Cys, Phe, Gly, His, Ile, Lys, Leu, Met, Asn, Gln, Arg, Ser, Val, Trp, or Tyr, X₉ is Gln, Ala, His, Phe, Pro, Ser, or Thr, X₁₀ is Ser, Arg, Ala, Asp, Glu, Phe, Gly, His, Ile, Lys, Leu, Met, Asn, Pro, Gln, Thr, Val, Trp, or Tyr, X₁₁ is Trp, Lys, Ala, Asp, Glu, Phe, Gly, His, Ile, Lys, Leu, Met, Asn, Pro, Gln, Arg, Ser, Thr, Val, or Tyr, X₁₂ is Ala, Cys, Ser, or Val, X₁₃ is Val or Arg, X₁₄ is Leu, Gln, His, Ile, Lys, or Ser, X₁₅ is GGGGS (SEQ ID NO: 184), GGGGSGGGGS (SEQ ID NO: 145), or EPKSS (SEQ ID NO: 146), and the sialidase comprises at least one mutation relative to wild-type human Neu2 (SEQ ID NO: 1). In certain embodiments, X₁ is Ala, Asp, Met, or not present, X₂ is Tyr or Val, X₃ is Lys or Asp, X₄ is Pro, Asn, Gly, Ser or Thr, X₅ is Ala or Glu, X₆ is Gln or Tyr, X₇ is Ile or Lys, X₈ is Ala or Thr, X₉ is Gln, Ala, or Thr, X₁₀ is Ser, Arg, or Ala, X₁₁ is Trp, Lys, or Arg, X₁₂ is Ala or Cys, X₁₃ is Val or Arg, and X₁₄ is Leu or Ile.

[0216] In certain embodiments, the first polypeptide comprises SEQ ID NO: 66, the second polypeptide comprises SEQ ID NO: 67, and the third polypeptide comprises SEQ ID NO: 68. In certain embodiments, the first polypeptide comprises SEQ ID NO: 66, the second polypeptide comprises SEQ ID NO: 67, and the third polypeptide comprises SEQ ID NO: 69. In certain embodiments, the first polypeptide comprises SEQ ID NO: 66, the second polypeptide comprises SEQ ID NO: 67, and the third polypeptide comprises SEQ ID NO: 70. In certain embodiments, the first polypeptide comprises SEQ ID NO: 66, the second polypeptide comprises SEQ ID NO: 67, and the third polypeptide comprises SEQ ID NO: 71. In certain embodiments, the first polypeptide comprises SEQ ID NO: 66, the second polypeptide comprises SEQ ID NO: 67, and the third polypeptide comprises SEQ ID NO: 72. In certain embodiments, the first polypeptide comprises SEQ ID NO: 66, the second polypeptide comprises SEQ ID NO: 67, and the third polypeptide comprises SEQ ID NO: 73. In certain embodiments, the first polypeptide comprises SEQ ID NO: 66, the second polypeptide comprises SEQ ID NO: 67, and the third polypeptide comprises SEQ ID NO: 74. In certain embodiments, the first polypeptide comprises SEQ ID NO: 66, the second polypeptide comprises SEQ ID NO: 67, and the third polypeptide comprises SEQ ID NO: 98. In certain embodiments, the first polypeptide comprises SEQ ID NO: 66, the second polypeptide comprises SEQ ID NO: 67, and the third polypeptide comprises SEQ ID NO: 99. In certain embodiments, the first polypeptide comprises SEQ ID NO: 66, the second polypeptide comprises SEQ ID NO: 67, and the third polypeptide comprises SEQ ID NO: 100. In certain embodiments, the first polypeptide comprises SEQ ID NO: 66, the second polypeptide comprises SEQ ID NO: 67, and the third polypeptide comprises SEQ ID NO: 101. In certain embodiments, the first polypeptide comprises SEQ ID NO: 66, the second polypeptide comprises SEQ ID NO: 67, and the third polypeptide comprises SEQ ID NO: 102. In certain embodiments, the first polypeptide comprises SEQ ID NO: 66, the second polypeptide comprises SEQ ID NO: 67, and the third polypeptide comprises SEQ ID NO: 103. In certain embodiments, the first polypeptide comprises SEQ ID NO: 66, the second polypeptide comprises SEQ ID NO: 67, and the third polypeptide comprises SEQ ID NO: 104. In certain embodiments, the first polypeptide comprises SEQ ID NO: 66, the second polypeptide comprises SEQ ID NO: 67, and the third polypeptide comprises SEQ ID NO: 105. In certain embodiments, the first polypeptide comprises SEQ ID NO: 66, the second polypeptide comprises SEQ ID NO: 67, and the third polypeptide comprises SEQ ID NO: 106. In certain embodiments, the first polypeptide comprises SEQ ID NO: 66, the second polypeptide comprises SEQ ID NO: 67, and the third polypeptide comprises SEQ ID NO: 107. In certain embodiments, the first polypeptide comprises SEQ ID NO: 66, the second polypeptide comprises SEQ ID NO: 67, and the third polypeptide comprises SEQ ID NO: 108. In certain embodiments, the first polypeptide comprises SEQ ID NO: 66, the second polypeptide comprises SEQ ID NO: 67, and the third polypeptide comprises SEQ ID NO: 109. In certain embodiments, the first polypeptide comprises SEQ ID NO: 66, the second polypeptide comprises SEQ ID NO: 67, and the third polypeptide comprises SEQ ID NO: 110. In certain embodiments, the first polypeptide comprises SEQ ID NO: 66, the second polypeptide comprises SEQ ID NO: 67, and the third polypeptide comprises SEQ ID NO: 111. In certain embodiments, the first polypeptide comprises SEQ ID NO: 66, the second polypeptide comprises SEQ ID NO: 67, and the third polypeptide comprises SEQ ID NO: 112. In certain embodiments, the first polypeptide comprises SEQ ID NO: 66, the second polypeptide comprises SEQ ID NO: 67, and the third polypeptide comprises SEQ ID NO: 150. In certain embodiments, the first polypeptide comprises SEQ ID NO: 66, the second polypeptide comprises SEQ ID NO: 67, and the third polypeptide comprises SEQ ID NO: 151. In certain embodiments, the first polypeptide comprises SEQ ID NO: 66, the second polypeptide comprises SEQ ID NO: 67, and the third polypeptide comprises SEQ ID NO: 155. In certain embodiments, the first polypeptide comprises SEQ ID NO: 66, the second polypeptide comprises SEQ ID NO: 67, and the third polypeptide comprises SEQ ID NO: 156. In certain embodiments, the first polypeptide comprises SEQ ID NO: 66, the second polypeptide comprises SEQ ID NO: 67, and the third polypeptide comprises SEQ ID NO: 160. In certain embodiments, the first polypeptide comprises SEQ ID NO: 66, the second polypeptide comprises SEQ ID NO: 67, and the third polypeptide comprises SEQ ID NO: 161. In certain embodiments, the first polypeptide comprises SEQ ID NO: 66, the second polypeptide comprises SEQ ID NO: 67, and the third polypeptide comprises SEQ ID NO: 192. In certain embodiments, the first polypeptide comprises SEQ ID NO: 66, the second polypeptide comprises SEQ ID NO: 67, and the third polypeptide comprises SEQ ID NO: 195. In certain embodiments, the first polypeptide comprises SEQ ID NO: 66, the second polypeptide comprises SEQ ID NO: 189, and the third polypeptide comprises SEQ ID NO: 185. In certain embodiments, the first polypeptide comprises SEQ ID NO: 66, the second polypeptide comprises SEQ ID NO: 189, and the third polypeptide comprises SEQ ID NO: 187. In certain embodiments, the first polypeptide comprises SEQ ID NO: 66, the second polypeptide comprises SEQ ID NO: 189, and the third polypeptide comprises SEQ ID NO: 205.

[0217] In certain embodiments, the antibody conjugate comprises a first polypeptide comprising a first sialidase, a first immunoglobulin Fc domain, and a first single chain variable fragment (scFv) (it is also understood that the scFv may be replaced by a first polypeptide chain of an immunoglobulin antigen binding fragment, e.g., Fab fragment); and a second polypeptide comprising a second sialidase, a second immunoglobulin Fc domain, and a second single chain variable fragment (scFv) (it is also understood that the scFv may be replaced by a second polypeptide chain of an immunoglobulin antigen binding fragment, e.g., Fab fragment). An example of this embodiment is shown in FIG. 11C (in the construct depicted in FIG. 11C it is understood that an scFv, when present, may be replaced with a Fab fragment, or a Fab fragment, when present, may be replaced with an scFv). The first and second polypeptides can be covalently linked together. The covalent linkages can be disulfide bonds. In certain embodiments, the first scFv defines a first antigen-binding site, and the second scFv defines a second antigen-binding site. In certain embodiments, the first polypeptide comprises the first sialidase, the first immunoglobulin Fc domain, and the first scFv in an N- to C-terminal orientation. In certain embodiments, the first polypeptide comprises the first scFv, the first immunoglobulin Fc domain, and the first sialidase in an N- to C-terminal orientation. In certain embodiments, the second polypeptide comprises the second sialidase, the second immunoglobulin Fc domain, and the second scFv in an N- to C-terminal orientation. In certain embodiments, the second polypeptide comprises the second scFv, the second immunoglobulin Fc domain, and the second sialidase in an N- to C-terminal orientation.

[0218] In certain embodiments, the first polypeptide comprises the amino acid sequence of any one of SEQ ID NOs: 77-83, 166-178, 194, 197, 244, or 249, or an amino acid sequence that has at least 85%, 90%, 95%, 96%, 97%, 98%, or 99% sequence identity to any one of SEQ ID NOs: 77-83, 166-178, 194, 197, 244, or 249. In certain embodiments, the second polypeptide comprises the amino acid sequence of any one of SEQ ID NOs: 77-83, 166-178, 194, 197, 244, or 249, or an amino acid sequence that has at least 85%, 90%, 95%, 96%, 97%, 98%, or 99% sequence identity to any one of SEQ ID NOs: 77-83, 166-178, 194, 197, 244, or 249.

[0219] In certain embodiments, the first and/or second polypeptide comprises the amino acid sequence of

(SEQ ID NO: 248)
X₁X₂SX₃X₄X₅LQX₆ESVFQSGAHAYRIPALLYLPGQQSLLAFAEQRX₇SX₈
X₉DEHAELIVX₁₀RRGDYDAX₁₁THQVQWX₁₂AQEVVAQAX₁₃LX₁₄GHRSMN
PCPLYDX₁₅QTGTLFLFFIAIPX₁₆X₁₇VTEX₁₈QQLQTRANVTRLX₁₉X₂₀V
TSTDHGRTWSSPRDLTDAAIGPX₂₁YREWSTFAVGPGHX₂₂LQLHDX₂₃X₂₄
RSLVVPAYAYRKLHPX₂₅X₂₆X₂₇PIPSAFX₂₈FLSHDHGRTWARGHFVX₂₉
QDTX₃₀ECQVAEVX₃₁TGEQRVVTLNARSX₃₂X₃₃X₃₄X₃₅RX₃₆QAQSX₃₇NX₃₈
GLDFQX₃₉X₄₀QX₄₁VKKLX₄₂EPPPX₄₃GX₄₄QGSVISFPSPRSGPGSPAQX₄₅
LLYTHPTHX₄₆X₄₇QRADLGAYLNPRPPAPEAWSEPX₄₈LLAKGSX₄₉AYSDL
QSMGTGPDGSPLFGX₅₀LYEANDYEEIX₅₁FX₅₂MFTLKQAFPAEYLPQX₅₃
DKTHTCPPCPAPELLGGPSVFLFPPKPKDTLMISRTPEVTCVVVDVSHED
PEVKFNWYVDGVEVHNAKTKPREEQYNSTYRVVSVLTVLHQDWLNGKEYK
CKVSNKALPAPIEKTISKAKGQPREPQVYTLPPSREEMTKNQVSLTCLVK
GFYPSDIAVEWESNGQPENNYKTTPPVLDSDGSFFLYSKLTVDKSRWQQG
NVFSCSVMHEALHNHYTQKSLSLSPGKGGGGSGGGGSGGGGSEVQLVESG
GGLVQPGGSLRLSCAASGFNIKDTYIHWVRQAPGKGLEWVARIYPTNGYT
RYADSVKGRFTISADTSKNTAYLQMNSLRAEDTAVYYCSRWGGDGFYAMD
YWGQGTLVTVSSGGGGSGGGGSGGGGSDIQMTQSPSSLSASVGDRVTITC
RASQDVNTAVAWYQQKPGKAPKLLIYSASFLYSGVPSRFSGSRSGTDFTL
TISSLQPEDFATYYCQQHYTTPPTFGQGTKVEIK,

wherein X₁ is Ala, Arg, Asn, Asp, Gln, Glu, Gly, His, Leu, Lys, Met, Phe, Thr, Val, or not present, X₂ is Ala or Lys, X₃ is Asn or Leu, X₄ is Pro or His, X₅ is Phe, Trp, Tyr or Val, X₆ is Lys or Asp, X₇ is Ala or Arg, X₈ is Lys, Arg, or Glu, X₉ is Lys, Ala, Arg, or Glu, X₁₀ is Leu or Met, X₁₁ is Pro, Asn, Asp, His, Glu, Gly, Ser or Thr, X₁₂ is Gln or His, X₁₃ is Arg or Lys, X₁₄ is Asp or Pro, X₁₅ is Ala, Glu or Lys, X₁₆ is Gly or Asp, X₁₇ is Gln or His, X₁₈ is Gln, Arg, or Lys, X₁₉ is Ala, Cys, Ile, Ser, Val, or Leu, X₂₀ is Gln, Leu, Glu, Phe, His, Ile, Leu, or Tyr, X₂₁ is Ala or Val, X₂₂ is Cys or Gly, X₂₃ is Arg or Pro, X₂₄ is Ala or Gly, X₂₅ is Arg, Ile, or Lys, X₂₆ is Gln or Pro, X₂₇ is Arg or Pro, X₂₈ is Ala, Cys, Leu, or Val, X₂₉ is Ala, Cys, Asn, Ser, or Thr, X₃₀ is Leu, Ala, or Val, X₃₁ is Glu or Pro, X₃₂ is His or Pro, X₃₃ is Leu, Asp, Asn, or Tyr, X₃₄ is Arg, Ala, Asp, Leu, Gln, or Tyr, X₃₅ is Ala, Cys, Phe, Gly, His, Ile, Lys, Leu, Met, Asn, Gln, Arg, Ser, Val, Trp, or Tyr, X₃₆ is Val, Ile, or Lys, X₃₇ is Thr or Ala, X₃₈ is Asp or Gly, X₃₉ is Glu, Lys, or Pro, X₄₀ is Ser or Cys, X₄₁ is Leu, Asp, Phe, Gln, or Thr, X₄₂ is Val or Phe, X₄₃ is Gln, Ala, His, Phe, Pro, Ser, or Thr, X₄₄ is Cys or Val, X₄₅ is Trp or Arg, X₄₆ is Ser, Arg, Ala, Asp, Glu, Phe, Gly, His, Ile, Lys, Leu, Met, Asn, Pro, Gln, Thr, Val, Trp, or Tyr, X₄₇ is Trp, Lys, Ala, Asp, Glu, Phe, Gly, His, Ile, Lys, Leu, Met, Asn, Pro, Gln, Arg, Ser, Thr, Val, or Tyr, X₄₈ is Lys or Val, X₄₉ is Ala, Cys, Ser, or Val, X₅₀ is Cys, Leu, or Val, X₅₁ is Val or Arg, X₅₂ is Leu, Gln, His, Ile, Lys, or Ser, and X₅₃ is GGGGS (SEQ ID NO: 184), GGGGSGGGGS (SEQ ID NO: 145), or EPKSS (SEQ ID NO: 146), and the sialidase comprises at least one mutation relative to wild-type human Neu2 (SEQ ID NO: 1).

[0220] In certain embodiments, the first and/or second polypeptide comprises the amino acid sequence of

(SEQ ID NO: 247)
X₁ASLPX₂LQX₃ESVFQSGAHAYRIPALLYLPGQQSLLAFAEQRX₄SKKD
EHAELIVLRRGDYDAX₅THQVQWQAQEVVAQARLDGHRSMNPCPLYDX₆Q
TGTLFLFFIAIPGQVTEQQQLQTRANVTRLCX₇VTSTDHGRTWSSPRDLT
DAAIGPAYREWSTFAVGPGHCLQLHDRARSLVVPAYAYRKLHPX₈QRPIP
SAFCFLSHDHGRTWARGHFVAQDTLECQVAEVETGEQRVVTLNARSHLR
X₉RVQAQSTNDGLDFQESQLVKKLVEPPPX₁₀GCQGSVISFPSPRSGPGS
PAQWLLYTHPTHX₁₁X₁₂QRADLGAYLNPRPPAPEAWSEPVLLAKGSX₁₃A
YSDLQSMGTGPDGSPLFGCLYEANDYEEIX₁₄FX₁₅MFTLKQAFPAEYLP
QX₁₆DKTHTCPPCPAPELLGGPSVFLFPPKPKDTLMISRTPEVTCVVVD
VSHEDPEVKFNWYVDGVEVHNAKTKPREEQYNSTYRVVSVLTVLHQDWL
NGKEYKCKVSNKALPAPIEKTISKAKGQPREPQVYTLPPSREEMTKNQV
SLTCLVKGFYPSDIAVEWESNGQPENNYKTTPPVLDSDGSFFLYSKLTV
DKSRWQQGNVFSCSVMHEALHNHYTQKSLSLSPGKGGGGSGGGGSGGGG
SEVQLVESGGGLVQPGGSLRLSCAASGFNIKDTYIHWVRQAPGKGLEWV
ARIYPTNGYTRYADSVKGRFTISADTSKNTAYLQMNSLRAEDTAVYYCS
RWGGDGFYAMDYWGQGTLVTVSSGGGGSGGGGSGGGGSDIQMTQSPSSL
SASVGDRVTITCRASQDVNTAVAWYQQKPGKAPKLLIYSASFLYSGVPS
RFSGSRSGTDFTLTISSLQPEDFATYYCQQHYTTPPTFGQGTKVEIK,

wherein X₁ is Ala, Arg, Asn, Asp, Gln, Glu, Gly, His, Leu, Lys, Met, Phe, Thr, Val, or not present, X₂ is Phe, Trp, Tyr or Val, X₃ is Lys or Asp, X₄ is Arg or Ala, X₅ is Pro, Asn, Asp, His, Glu, Gly, Ser or Thr, X₆ is Ala, Glu, or Lys, X₇ is Gln, Leu, Glu, Phe, His, Ile, Leu, or Tyr, X₈ is Arg, Ile, or Lys, X₉ is Ala, Cys, Phe, Gly, His, Ile, Lys, Leu, Met, Asn, Gln, Arg, Ser, Val, Trp, or Tyr, X₁₀ is Gln, Ala, His, Phe, Pro, Ser, or Thr, X₁₁ is Ser, Arg, Ala, Asp, Glu, Phe, Gly, His, Ile, Lys, Leu, Met, Asn, Pro, Gln, Thr, Val, Trp, or Tyr, X₁₂ is Trp, Lys, Ala, Asp, Glu, Phe, Gly, His, Ile, Lys, Leu, Met, Asn, Pro, Gln, Arg, Ser, Thr, Val, or Tyr, X₁₃ is Ala, Cys, Ser, or Val, X₁₄ is Val or Arg, X₁₅ is Leu, Gln, His, Ile, Lys, or Ser, and X₁₆ is GGGGS (SEQ ID NO: 184), GGGGSGGGGS (SEQ ID NO: 145), or EPKSS (SEQ ID NO: 146), and the sialidase comprises at least one mutation relative to wild-type human Neu2 (SEQ ID NO: 1). In certain embodiments, X₁ is Ala, Asp, Met, or not present, X₂ is Tyr or Val, X₃ is Lys or Asp, X₄ is Arg or Ala, X₅ is Pro, Asn, Gly, Ser or Thr, X₆ is Ala or Glu, X₇ is Gln or Tyr, X₈ is Ile or Lys, X₉ is Ala or Thr, X₁₀ is Gln, Ala, or Thr, X₁₁ is Ser, Arg, or Ala, X₁₂ is Trp, Lys, or Arg, X₁₃ is Ala or Cys, X₁₄ is Val or Arg, and X₁₅ is Leu or Ile.

[0221] In certain embodiments, the first and/or second polypeptide comprises the amino acid sequence of

(SEQ ID NO: 85)
X₁X₂SX₃X₄X₅LQX₆ESVFQSGAHAYRIPALLYLPGQQSLLAFAEQRASX₇
X₈DEHAELIVX₉RRGDYDAX₁₀THQVQWX₁₁AQEVVAQAX₁₂LDGHRSMNPC
PLYDX₁₃QTGTLFLFFIAIPX₁₄X₁₅VTEX₁₆QQLQTRANVTRLX₁₇X₁₈VTS
TDHGRTWSSPRDLTDAAIGPX₁₉YREWSTFAVGPGHX₂₀LQLHDRX₂₁RSL
VVPAYAYRKLHPX₂₂QRPIPSAFX₂₃FLSHDHGRTWARGHFVAQDTX₂₄EC
QVAEVETGEQRVVTLNARSHLRARVQAQSX₂₅NX₂₆GLDFQX₂₇SQLVKKL
VEPPPX₂₈GX₂₉QGSVISFPSPRSGPGSPAQX₃₀LLYTHPTHX₃₁X₃₂QRAD
LGAYLNPRPPAPEAWSEPX₃₃LLAKGSX₃₄AYSDLQSMGTGPDGSPLFG
X₃₅LYEANDYEEIX₃₆FX₃₇MFTLKQAFPAEYLPQGGGGSGGGGSDKTHTC
PPCPAPELLGGPSVFLFPPKPKDTLMISRTPEVTCVVVDVSHEDPEVKF
NWYVDGVEVHNAKTKPREEQYNSTYRVVSVLTVLHQDWLNGKEYKCKVS
NKALPAPIEKTISKAKGQPREPQVYTLPPSREEMTKNQVSLTCLVKGFY
PSDIAVEWESNGQPENNYKTTPPVLDSDGSFFLYSKLTVDKSRWQQGNV
FSCSVMHEALHNHYTQKSLSLSPGKGGGGSGGGGSGGGGSEVQLVESGG
GLVQPGGSLRLSCAASGFNIKDTYIHWVRQAPGKGLEWVARIYPTNGYT
RYADSVKGRFTISADTSKNTAYLQMNSLRAEDTAVYYCSRWGGDGFYAM
DYWGQGTLVTVSSGGGGSGGGGSGGGGSDIQMTQSPSSLSASVGDRVTI
TCRASQDVNTAVAWYQQKPGKAPKLLIYSASFLYSGVPSRFSGSRSGTD
FTLTISSLQPEDFATYYCQQHYTTPPTFGQGTKVEIK,

wherein X₁ is Ala, Arg, Asn, Asp, Gln, Glu, Gly, His, Leu, Lys, Met, Phe, Thr, Val, or not present, X₂ is Ala or Lys, X₃ is Asn or Leu, X₄ is Pro or His, X₅ is Phe, Trp, Tyr or Val, X₆ is Lys or Asp; X₇ is Lys, Arg, or Glu. X₈ is Lys, Ala, Arg, or Glu, X₉ is Leu or Met, X₁₀ is Pro, Asn, Asp, His, Glu, Gly, Ser or Thr, X₁₁ is Gln or His, X₁₂ is Arg or Lys, X₁₃ is Ala, Glu or Lys, X₁₄ is Gly or Asp, X₁₅ is Gln or His, X₁₆ is Gln, Arg, or Lys, X₁₇ is Ala, Cys, Ile, Ser, Val, or Leu, X₁₈ is Gln or Leu, X₁₉ is Ala or Val, X₂₀ is Cys or Gly, X₂₁ is Ala or Gly, X₂₂ is Arg, Ile, or Lys, X₂₃ is Ala, Cys, Leu, or Val, X₂₄ is Leu, Ala, or Val, X₂₅ is Thr or Ala, X₂₆ is Asp or Gly, X₂₇ is Glu or Lys, X₂₈ is Gln, Ala, His, Phe, or Pro, X₂₉ is Cys or Val, X₃₀ is Trp or Arg, X₃₁ is Ser or Arg, X₃₂ is Trp or Lys, X₃₃ is Lys or Val, X₃₄ is Ala, Cys, Ser, or Val, X₃₅ is Cys, Leu, or Val, X₃₆ is Val or Arg, and X₃₇ is Leu, Gln, His, Ile, Lys, or Ser, and the sialidase comprises at least one mutation relative to wild-type human Neu2 (SEQ ID NO: 1).

[0222] In certain embodiments, the first and/or second polypeptide comprises the amino acid sequence of

(SEQ ID NO: 84)
X₁ASLPX₂LQX₃ESVFQSGAHAYRIPALLYLPGQQSLLAFAEQRASKKDE
HAELIVLRRGDYDAX₄THQVQWQAQEVVAQARLDGHRSMNPCPLYDX₅QT
GTLFLFFIAIPGQVTEQQQLQTRANVTRLCQVTSTDHGRTWSSPRDLTD
AAIGPAYREWSTFAVGPGHCLQLHDRARSLVVPAYAYRKLHPX₆QRPIP
SAFCFLSHDHGRTWARGHFVAQDTLECQVAEVETGEQRVVTLNARSHLR
ARVQAQSTNDGLDFQESQLVKKLVEPPPX₇GCQGSVISFPSPRSGPGSP
AQWLLYTHPTHX₈X₉QRADLGAYLNPRPPAPEAWSEPVLLAKGSX₁₀AYS
DLQSMGTGPDGSPLFGCLYEANDYEEIX₁₁FX₁₂MFTLKQAFPAEYLPQG
GGGSGGGGSDKTHTCPPCPAPELLGGPSVFLFPPKPKDTLMISRTPEVT
CVVVDVSHEDPEVKFNWYVDGVEVHNAKTKPREEQYNSTYRVVSVLTVL
HQDWLNGKEYKCKVSNKALPAPIEKTISKAKGQPREPQVYTLPPSREEM
TKNQVSLTCLVKGFYPSDIAVEWESNGQPENNYKTTPPVLDSDGSFFLY
SKLTVDKSRWQQGNVFSCSVMHEALHNHYTQKSLSLSPGKGGGGSGGGG
SGGGGSEVQLVESGGGLVQPGGSLRLSCAASGFNIKDTYIHWVRQAPGK
GLEWVARIYPTNGYTRYADSVKGRFTISADTSKNTAYLQMNSLRAEDTA
VYYCSRWGGDGFYAMDYWGQGTLVTVSSGGGGSGGGGSGGGGSDIQMTQ
SPSSLSASVGDRVTITCRASQDVNTAVAWYQQKPGKAPKLLIYSASFLY
SGVPSRFSGSRSGTDFTLTISSLQPEDFATYYCQQHYTTPPTFGQGTKV
EIK,

wherein X₁ is Ala, Arg, Asn, Asp, Gln, Glu, Gly, His, Leu, Lys, Met, Phe, Thr, Val, or not present, X₂ is Phe, Trp, Tyr or Val, X₃ is Lys or Asp, X₄ is Pro, Asn, Asp, His, Glu, Gly, Ser or Thr, X₅ is Ala, Glu, or Lys, X₆ is Arg, Ile, or Lys, X₇ is Gln, Ala, His, Phe, or Pro, X₈ is Ser or Arg, X₉ is Trp or Lys, X₁₀ is Ala, Cys, Ser, or Val, X₁₁ is Val or Arg, and X₁₂ is Leu, Gln, His, Ile, Lys, or Ser, and the sialidase comprises at least one mutation relative to wild-type human Neu2 (SEQ ID NO: 1). In certain embodiments, X₁ is Ala, Asp, Met, or not present, X₂ is Tyr or Val, X₃ is Lys or Asp, X₄ is Pro, Asn, Gly, Ser or Thr, X₅ is Ala or Glu, X₆ is Ile or Lys, X₇ is Gln or Ala, X₈ is Ser or Arg, X₉ is Trp or Lys, X₁₀ is Ala or Cys, X₁₁ is Val or Arg, and X₁₂ is Leu or Ile.

[0223] In certain embodiments, the first and/or second polypeptide comprises the amino acid sequence of

(SEQ ID NO: 180)
X₁X₂SX₃X₄X₅LQX₆ESVFQSGAHAYRIPALLYLPGQQSLLAFAEQRASX₇
X₈DEHAELIVX₉RRGDYDAX₁₀THQVQWX₁₁AQEVVAQAX₁₂LX₁₃GHRSMNP
CPLYDX₁₄QTGTLFLFFIAIPX₁₅X₁₆VTEX₁₇QQLQTRANVTRLX₁₈X₁₉VTS
TDHGRTWSSPRDLTDAAIGPX₂₀YREWSTFAVGPGHX₂₁LQLHDX₂₂X₂₃RS
LVVPAYAYRKLHPX₂₄X₂₅X₂₆PIPSAFX₂₇FLSHDHGRTWARGHFVX₂₈QDT
X₂₉ECQVAEVX₃₀TGEQRVVTLNARSX₃₁X₃₂X₃₃X₃₄RX₃₅QAQSX₃₆NX₃₇GLD
FQX₃₈X₃₉QX₄₀VKKLX₄₁EPPPX₄₂GX₄₃QGSVISFPSPRSGPGSPAQX₄₄LL
YTHPTHX₄₅X₄₆QRADLGAYLNPRPPAPEAWSEPX₄₇LLAKGSX₄₈AYSDLQ
SMGTGPDGSPLFGX₄₉LYEANDYEEIX₅₀FX₅₁MFTLKQAFPAEYLPQX₅₂D
KTHTCPPCPAPELLGGPSVFLFPPKPKDTLMISRTPEVTCVVVDVSHED
PEVKFNWYVDGVEVHNAKTKPREEQYNSTYRVVSVLTVLHQDWLNGKEY
KCKVSNKALPAPIEKTISKAKGQPREPQVYTLPPSREEMTKNQVSLTCL
VKGFYPSDIAVEWESNGQPENNYKTTPPVLDSDGSFFLYSKLTVDKSRW
QQGNVFSCSVMHEALHNHYTQKSLSLSPGKGGGGSGGGGSGGGGSEVQL
VESGGGLVQPGGSLRLSCAASGFNIKDTYIHWVRQAPGKGLEWVARIYP
TNGYTRYADSVKGRFTISADTSKNTAYLQMNSLRAEDTAVYYCSRWGGD
GFYAMDYWGQGTLVTVSSGGGGSGGGGSGGGGSDIQMTQSPSSLSASVG
DRVTITCRASQDVNTAVAWYQQKPGKAPKLLIYSASFLYSGVPSRFSGS
RSGTDFTLTISSLQPEDFATYYCQQHYTTPPTFGQGTKVEIK,

wherein X₁ is Ala, Arg, Asn, Asp, Gln, Glu, Gly, His, Leu, Lys, Met, Phe, Thr, Val, or not present, X₂ is Ala or Lys, X₃ is Asn or Leu, X₄ is Pro or His, X₅ is Phe, Trp, Tyr or Val, X₆ is Lys or Asp, X₇ is Lys, Arg, or Glu, X₈ is Lys, Ala, Arg, or Glu, X₉ is Leu or Met, X₁₀ is Pro, Asn, Asp, His, Glu, Gly, Ser or Thr, X₁₁ is Gln or His, X₁₂ is Arg or Lys, X₁₃ is Asp or Pro, X₁₄ is Ala, Glu or Lys, X₁₅ is Gly or Asp, X₁₆ is Gln or His, X₁₇ is Gln, Arg, or Lys, X₁₈ is Ala, Cys, Ile, Ser, Val, or Leu, X₁₉ is Gln, Leu, Glu, Phe, His, Ile, Leu, or Tyr, X₂₀ is Ala or Val, X₂₁ is Cys or Gly, X₂₂ is Arg or Pro, X₂₃ is Ala or Gly, X₂₄ is Arg, Ile, or Lys, X₂₅ is Gln or Pro, X₂₆ is Arg or Pro, X₂₇ is Ala, Cys, Leu, or Val, X₂₈ is Ala, Cys, Asn, Ser, or Thr, X₂₉ is Leu, Ala, or Val, X₃₀ is Glu or Pro, X₃₁ is His or Pro, X₃₂ is Leu, Asp, Asn, or Tyr, X₃₃ is Arg, Ala, Asp, Leu, Gln, or Tyr, X₃₄ is Ala, Cys, Phe, Gly, His, Ile, Lys, Leu, Met, Asn, Gln, Arg, Ser, Val, Trp, or Tyr, X₃₅ is Val, Ile, or Lys, X₃₆ is Thr or Ala, X₃₇ is Asp or Gly, X₃₈ is Glu, Lys, or Pro, X₃₉ is Ser or Cys, X₄₀ is Leu, Asp, Phe, Gln, or Thr, X₄₁ is Val or Phe, X₄₂ is Gln, Ala, His, Phe, Pro, Ser, or Thr, X₄₃ is Cys or Val, X₄₄ is Trp or Arg, X₄₅ is Ser, Arg, Ala, Asp, Glu, Phe, Gly, His, Ile, Lys, Leu, Met, Asn, Pro, Gln, Thr, Val, Trp, or Tyr, X₄₆ is Trp, Lys, Ala, Asp, Glu, Phe, Gly, His, Ile, Lys, Leu, Met, Asn, Pro, Gln, Arg, Ser, Thr, Val, or Tyr, X₄₇ is Lys or Val, X₄₈ is Ala, Cys, Ser, or Val, X₄₉ is Cys, Leu, or Val, X₅₀ is Val or Arg, X₅₁ is Leu, Gln, His, Ile, Lys, or Ser, X₅₂ is GGGGS (SEQ ID NO: 184), GGGGSGGGGS (SEQ ID NO: 145), or EPKSS (SEQ ID NO: 146), and the sialidase comprises at least one mutation relative to wild-type human Neu2 (SEQ ID NO: 1).

[0224] In certain embodiments, the first and/or second polypeptide comprises the amino acid sequence of

(SEQ ID NO: 179)
X₁ASLPX₂LQX₃ESVFQSGAHAYRIPALLYLPGQQSLLAFAEQRASKKDE
HAELIVLRRGDYDAX₄THQVQWQAQEVVAQARLDGHRSMNPCPLYDX₅QT
GTLFLFFIAIPGQVTEQQQLQTRANVTRLCX₆VTSTDHGRTWSSPRDLTD
AAIGPAYREWSTFAVGPGHCLQLHDRARSLVVPAYAYRKLHPX₇QRPIPS
AFCFLSHDHGRTWARGHFVAQDTLECQVAEVETGEQRVVTLNARSHLRX₈
RVQAQSTNDGLDFQESQLVKKLVEPPPX₉GCQGSVISFPSPRSGPGSPAQ
WLLYTHPTHX₁₀X₁₁QRADLGAYLNPRPPAPEAWSEPVLLAKGSX₁₂AYSDL
QSMGTGPDGSPLFGCLYEANDYEEIX₁₃FX₁₄MFTLKQAFPAEYLPQX₁₅DK
THTCPPCPAPELLGGPSVFLFPPKPKDTLMISRTPEVTCVVVDVSHEDPE
VKFNWYVDGVEVHNAKTKPREEQYNSTYRVVSVLTVLHQDWLNGKEYKCK
VSNKALPAPIEKTISKAKGQPREPQVYTLPPSREEMTKNQVSLTCLVKGF
YPSDIAVEWESNGQPENNYKTTPPVLDSDGSFFLYSKLTVDKSRWQQGNV
FSCSVMHEALHNHYTQKSLSLSPGKGGGGSGGGGSGGGGSEVQLVESGGG
LVQPGGSLRLSCAASGFNIKDTYIHWVRQAPGKGLEWVARIYPTNGYTRY
ADSVKGRFTISADTSKNTAYLQMNSLRAEDTAVYYCSRWGGDGFYAMDYW
GQGTLVTVSSGGGGSGGGGSGGGGSDIQMTQSPSSLSASVGDRVTITCRA
SQDVNTAVAWYQQKPGKAPKLLIYSASFLYSGVPSRFSGSRSGTDFTLTI
SSLQPEDFATYYCQQHYTTPPTFGQGTKVEIK,

wherein X₁ is Ala, Arg, Asn, Asp, Gln, Glu, Gly, His, Leu, Lys, Met, Phe, Thr, Val, or not present, X₂ is Phe, Trp, Tyr or Val, X₃ is Lys or Asp, X₄ is Pro, Asn, Asp, His, Glu, Gly, Ser or Thr, X₅ is Ala, Glu, or Lys, X₆ is Gln, Leu, Glu, Phe, His, Ile, Leu, or Tyr, X₇ is Arg, Ile, or Lys, X₈ is Ala, Cys, Phe, Gly, His, Ile, Lys, Leu, Met, Asn, Gln, Arg, Ser, Val, Trp, or Tyr, X₉ is Gln, Ala, His, Phe, Pro, Ser, or Thr, X₁₀ is Ser, Arg, Ala, Asp, Glu, Phe, Gly, His, Ile, Lys, Leu, Met, Asn, Pro, Gln, Thr, Val, Trp, or Tyr, X₁₁ is Trp, Lys, Ala, Asp, Glu, Phe, Gly, His, Ile, Lys, Leu, Met, Asn, Pro, Gln, Arg, Ser, Thr, Val, or Tyr, X₁₂ is Ala, Cys, Ser, or Val, X₁₃ is Val or Arg, X₁₄ is Leu, Gln, His, Ile, Lys, or Ser, X₁₅ is GGGGS (SEQ ID NO: 184), GGGGSGGGGS (SEQ ID NO: 145), or EPKSS (SEQ ID NO: 146), and the sialidase comprises at least one mutation relative to wild-type human Neu2 (SEQ ID NO: 1). In certain embodiments, X₁ is Ala, Asp, Met, or not present, X₂ is Tyr or Val, X₃ is Lys or Asp, X₄ is Pro, Asn, Gly, Ser or Thr, X₅ is Ala or Glu, X₆ is Gln or Tyr, X₇ is Ile or Lys, X₈ is Ala or Thr, X₉ is Gln, Ala, or Thr, X₁₀ is Ser, Arg, or Ala, X₁₁ is Trp, Lys, or Arg, X₁₂ is Ala or Cys, X₁₃ is Val or Arg, and X₁₄ is Leu or Ile.

[0225] In certain embodiments, the first and second polypeptide comprise SEQ ID NO: 77. In certain embodiments, the first and second polypeptide comprise SEQ ID NO: 78. In certain embodiments, the first and second polypeptide comprise SEQ ID NO: 79. In certain embodiments, the first and second polypeptide comprise SEQ ID NO: 80. In certain embodiments, the first and second polypeptide comprise SEQ ID NO: 81. In certain embodiments, the first and second polypeptide comprise SEQ ID NO: 82. In certain embodiments, the first and second polypeptide comprise SEQ ID NO: 83. In certain embodiments, the first and second polypeptide comprise SEQ ID NO: 166. In certain embodiments, the first and second polypeptide comprise SEQ ID NO: 167. In certain embodiments, the first and second polypeptide comprise SEQ ID NO: 168. In certain embodiments, the first and second polypeptide comprise SEQ ID NO: 169. In certain embodiments, the first and second polypeptide comprise SEQ ID NO: 170. In certain embodiments, the first and second polypeptide comprise SEQ ID NO: 171. In certain embodiments, the first and second polypeptide comprise SEQ ID NO: 172. In certain embodiments, the first and second polypeptide comprise SEQ ID NO: 173. In certain embodiments, the first and second polypeptide comprise SEQ ID NO: 174. In certain embodiments, the first and second polypeptide comprise SEQ ID NO: 175. In certain embodiments, the first and second polypeptide comprise SEQ ID NO: 176. In certain embodiments, the first and second polypeptide comprise SEQ ID NO: 177. In certain embodiments, the first and second polypeptide comprise SEQ ID NO: 178. In certain embodiments, the first and second polypeptide comprise SEQ ID NO: 194. In certain embodiments, the first and second polypeptide comprise SEQ ID NO: 197. In certain embodiments, the first and second polypeptide comprise SEQ ID NO: 244. In certain embodiments, the first and second polypeptide comprise SEQ ID NO: 249.

[0226] In certain embodiments, the antibody conjugate comprises: a first polypeptide comprising an immunoglobulin light chain; a second polypeptide comprising an immunoglobulin heavy chain and a single chain variable fragment (scFv) (it is also understood that the scFv may be replaced by a first polypeptide chain of an immunoglobulin antigen binding fragment, e.g., Fab fragment); and a third polypeptide comprising an immunoglobulin Fc domain and a sialidase. An example of this embodiment is shown in FIG. 11D. The first and second polypeptides can be covalently linked together and the second and third polypeptides can be covalently linked together. The covalent linkages can be disulfide bonds. In certain embodiments, the first polypeptide and the second polypeptide together define a first antigen-binding site (i.e., the immunoglobulin light chain and immunoglobulin heavy chain together define a first antigen-binding site). In certain embodiments, the scFv defines a second antigen-binding site. In certain embodiments, the second polypeptide comprises the immunoglobulin heavy chain and the scFv in an N- to C-terminal orientation, or the scFv and the immunoglobulin heavy chain in an N- to C-terminal orientation. In certain embodiments, the third polypeptide comprises the sialidase and the immunoglobulin Fc domain in an N- to C-terminal orientation, or the sialidase and the immunoglobulin Fc domain in an N- to C-terminal orientation.

[0227] In certain embodiments, the antibody conjugate comprises a first polypeptide comprising a first immunoglobulin light chain; a second polypeptide comprising a first sialidase, a first immunoglobulin Fc domain, and a first immunoglobulin heavy chain variable region; a third polypeptide comprising a second sialidase, a second immunoglobulin Fc domain, and a second immunoglobulin heavy chain variable region; and a fourth polypeptide comprising a second immunoglobulin light chain. It is also understood that an immunoglobulin light chain may be replaced by an immunoglobulin heavy chain variable region and an immunoglobulin heavy chain variable region may be replaced by an immunoglobulin light chain (e.g., the antibody conjugate may comprise a first polypeptide comprising a first immunoglobulin heavy chain variable region; a second polypeptide comprising a first sialidase, a first immunoglobulin Fc domain, and a first immunoglobulin light chain; a third polypeptide comprising a second sialidase, a second immunoglobulin Fc domain, and a second immunoglobulin light chain; and a fourth polypeptide comprising a second immunoglobulin heavy chain variable region). An example of this embodiment is shown in FIG. 11E. The second and third polypeptides can be covalently linked together. The covalent linkages can be disulfide bonds. In certain embodiments, the first and second polypeptides define a first antigen-binding site, and the third and fourth polypeptides define a second antigen-binding site. In certain embodiments, the second polypeptide comprises the first sialidase, the first immunoglobulin Fc domain, and the first immunoglobulin heavy chain variable region in an N- to C-terminal orientation. In certain embodiments, the third polypeptide comprises the second sialidase, the second immunoglobulin Fc domain, and the second immunoglobulin heavy chain variable region in an N- to C-terminal orientation.

[0228] In certain embodiments, the antibody conjugate has a molecular weight from about 135 kDa to about 165 kDa, e.g., about 140 kDa. In other embodiments, the antibody conjugate has a molecular weight from about 215 kDa to about 245 kDa, e.g., about 230 kDa.

[0229] In certain embodiments, the antibody conjugate comprises two polypeptides that each comprise an immunoglobulin Fc domain, and the first polypeptide has either a “knob” mutation, e.g., T366Y, or a “hole” mutation, e.g., Y407T, for heterodimerization with the second polypeptide, and the second polypeptide has either a respective “knob” mutation, e.g., T366Y, or a “hole” mutation, e.g., Y407T, for heterodimerization with the first polypeptide (residue numbers according to EU numbering, Kabat, E. A., et al. (1991) supra). For example, in certain embodiments, the antibody comprises two polypeptides that each comprise an immunoglobulin Fc domain derived from human IgG1 Fc domain, and the first polypeptide comprises a Y407T mutation (e.g., the first polypeptide comprises SEQ ID NO: 32, SEQ ID NO: 147, SEQ ID NO: 213, or SEQ ID NO: 215), and the second polypeptide comprises a T366Y mutation (e.g., the second polypeptide comprises SEQ ID NO: 33, SEQ ID NO: 148, SEQ ID NO: 214, or SEQ ID NO: 216).

[0230] As used herein, the term “multispecific antibody” is understood to mean an antibody that specifically binds to at least two different antigens, i.e., an antibody that comprises at least two antigen-binding sites that bind to at least two different antigens. As used herein, the term “bispecific antibody” is understood to mean an antibody that specifically binds to two different antigens, i.e., an antibody that comprises two antigen-binding sites each of which bind to separate and distinct antigens. In other words, a first binding site binds a first antigen and a second binding site binds a second, different antigen. A multispecific or bispecific antibody may, for example, be a human or humanized antibody, and/or be a full length antibody or an antibody fragment (e.g., a F(ab′)2 bispecific antibody).

[0231] The present invention encompasses antibody conjugates comprising antibody fragments, which may be generated by traditional means, such as enzymatic digestion, or by recombinant techniques. For a review of certain antibody fragments, see Hudson et al. (2003) supra.

[0232] In certain embodiments, the antibody conjugate or fusion protein can be covalently or non-covalently associated with a biological modifier, wherein the biological modifier can be used to enhance the solubility of the antibody, increase binding specificity, decrease immunogenicity or toxicity or modify the pharmacokinetic profile of the antibody. For example, the biological modifier can be used to increase the molecular weight of the antibody to increase its circulating half-life.

[0233] It is contemplated that the antibody conjugate or fusion protein may be covalently bound to one or more (for example, 2, 3, 4, 5, 6, 8, 9, 10 or more) biological modifiers that may comprise linear or branched polymers. Exemplary biological modifiers may include, for example, a variety of polymers, such as those described in U.S. Pat. No. 7,842,789.

[0234] Particularly useful are polyalkylene ethers such as polyethylene glycol (PEG) and derivatives thereof (for example, alkoxy polyethylene glycol, for example, methoxypolyethylene glycol, ethoxypolyethylene glycol and the like); block copolymers of polyoxyethylene and polyoxypropylene (Pluronics); polymethacrylates; carbomers; and branched or unbranched polysaccharides which comprise the saccharide monomers such as D-mannose, D- and L-galactose, fucose, fructose, D-xylose, L-arabinose, and D-glucuronic acid.

[0235] In other embodiments, the biological modifier can be a hydrophilic polyvinyl polymer such as polyvinyl alcohol and polyvinylpyrrolidone (PVP)-type polymers. The biological modifier can be a functionalized polyvinylpyrrolidone, for example, carboxy or amine functionalized on one (or both) ends of the polymer (as available from PolymerSource). Alternatively, the biological modifier can include Poly N-(2-hydroxypropyl)methacrylamide (HPMA), or functionalized HPMA (amine, carboxy, etc.), Poly(N-isopropylacrylamide) or functionalized poly(N-isopropylacrylamide). Alternatively, the biological modifier can include Poly N-(2-hydroxypropyl)methacrylamide (HPMA), or functionalized HPMA (amine, carboxy, etc.), Poly(N-isopropylacrylamide) or functionalized poly(N-isopropylacrylamide). The modifier prior to conjugation need not be, but preferably is, water soluble, but the final conjugate should be water soluble.

[0236] In general, the biological modifier may have a molecular weight from about 2 kDa to about 5 kDa, from about 2 kDa to about 10 kDa, from about 2 kDa to about 20 kDa, from about 2 kDa to about 30 kDa, from about 2 kDa to about 40 kDa, from about 2 kDa to about 50 kDa, from about 2 kDa to about 60 kDa, from about 2 kDa to about 70 kDa, from about 2 kDa to about 80 kDa, from about 2 kDa to about 90 kDa, from about 2 kDa to about 100 kDa, from about 2 kDa to about 150 kDa, from about 5 kDa to about 10 kDa, from about 5 kDa to about 20 kDa, from about 5 kDa to about 30 kDa, from about 5 kDa to about 40 kDa, from about 5 kDa to about 50 kDa, from about 5 kDa to about 60 kDa, from about 5 kDa to about 70 kDa, from about 5 kDa to about 80 kDa, from about 5 kDa to about 90 kDa, from about 5 kDa to about 100 kDa, from about 5 kDa to about 150 kDa, from about 10 kDa to about 20 kDa, from about 10 kDa to about 30 kDa, from about 10 kDa to about 40 kDa, from about 10 kDa to about 50 kDa, from about 10 kDa to about 60 kDa, from about 10 kDa to about 70 kDa, from about 10 kDa to about 80 kDa, from about 10 kDa to about 90 kDa, from about 10 kDa to about 100 kDa, from about 10 kDa to about 150 kDa, from about 20 kDa to about 30 kDa, from about 20 kDa to about 40 kDa, from about 20 kDa to about 50 kDa, from about 20 kDa to about 60 kDa, from about 20 kDa to about 70 kDa, from about 20 kDa to about 80 kDa, from about 20 kDa to about 90 kDa, from about 20 kDa to about 100 kDa, from about kDa to about 150 kDa, from about 30 kDa to about 40 kDa, from about 30 kDa to about 50 kDa, from about 30 kDa to about 60 kDa, from about 30 kDa to about 70 kDa, from about kDa to about 80 kDa, from about 30 kDa to about 90 kDa, from about 30 kDa to about 100 kDa, from about 30 kDa to about 150 kDa, from about 40 kDa to about 50 kDa, from about 40 kDa to about 60 kDa, from about 40 kDa to about 70 kDa, from about 40 kDa to about 80 kDa, from about 40 kDa to about 90 kDa, from about 40 kDa to about 100 kDa, from about 40 kDa to about 150 kDa, from about 50 kDa to about 60 kDa, from about 50 kDa to about 70 kDa, from about 50 kDa to about 80 kDa, from about 50 kDa to about 90 kDa, from about 50 kDa to about 100 kDa, from about 50 kDa to about 150 kDa, from about 60 kDa to about 70 kDa, from about 60 kDa to about 80 kDa, from about 60 kDa to about 90 kDa, from about 60 kDa to about 100 kDa, from about 60 kDa to about 150 kDa, from about 70 kDa to about 80 kDa, from about 70 kDa to about 90 kDa, from about 70 kDa to about 100 kDa, from about 70 kDa to about 150 kDa, from about 80 kDa to about 90 kDa, from about 80 kDa to about 100 kDa, from about 80 kDa to about 150 kDa, from about 90 kDa to about 100 kDa, from about 90 kDa to about 150 kDa, or from about 100 kDa to about 150 kDa.

[0237] It is contemplated that the antibody conjugate or fusion protein is attached to about or fewer polymer molecules (e.g., 9, 8, 7, 6, 5, 4, 3, 2, or 1), each polymer molecule having a molecular weight of at least about 20,000 D, or at least about 30,000 D, or at least about 40,000 D.

[0238] Although a variety of polymers can be used as biological modifiers, it is contemplated that the antibody conjugates or fusion proteins described herein may be attached to polyethylene glycol (PEG) polymers. In one embodiment, the antibody conjugate or fusion protein described herein is covalently attached to at least one PEG having an actual MW of at least about 20,000 D. In another embodiment, the antibody conjugate or fusion protein described herein is covalently attached to at least one PEG having an actual MW of at least about 30,000 D. In another embodiment, the antibody conjugate or fusion protein described herein is covalently attached to at least one PEG having an actual MW of at least about 40,000 D. In certain embodiments, the PEG is methoxyPEG(5000)-succinimidylpropionate (mPEG-SPA), methoxyPEG(5000)-succinimidylsuccinate (mPEG-SS). Such PEGS are commercially available from Nektar Therapeutics or SunBiowest.

[0239] Attachment sites on an antibody conjugate or fusion protein for a biological modifier include the N-terminal amino group and epsilon amino groups found on lysine residues, as well as other amino, imino, carboxyl, sulfhydryl, hydroxyl or other hydrophilic groups. The polymer may be covalently bonded directly to the antibody conjugate or fusion protein with or without the known use of a multifunctional (ordinarily bifunctional) crosslinking agent using chemistries and used in the art. For example, sulfhydryl groups can be derivatized by coupling to maleimido-substituted PEG (e.g. alkoxy-PEG amine plus sulfosuccinimidyl 4-(N-maleimidomethyl)cyclohexane-1-carboxylate), or PEG-maleimide commercially available from Shearwater Polymers, Inc., Huntsville, Ala.).

### III. Methods of Making a Recombinant Sialidase, Fusion Protein, or Antibody Conjugate

[0240] Methods for producing recombinant sialidases (e.g., human sialidases), fusion proteins, e.g., those disclosed herein, antibodies, or antibody conjugates, e.g., those disclosed herein, are known in the art. For example, DNA molecules encoding light chain variable regions and/or heavy chain variable regions can be synthesized chemically or by recombinant DNA methodologies. For example, the sequences of the antibodies can be cloned from hybridomas by conventional hybridization techniques or polymerase chain reaction (PCR) techniques, using the appropriate synthetic nucleic acid primers. The resulting DNA molecules encoding the variable regions of interest can be ligated to other appropriate nucleotide sequences, including, for example, constant region coding sequences, and expression control sequences, to produce conventional gene expression constructs (i.e., expression vectors) encoding the desired antibodies. Production of defined gene constructs is within routine skill in the art.

[0241] Nucleic acids encoding desired recombinant human sialidases, fusion proteins, and/or antibody conjugates can be incorporated (ligated) into expression vectors, which can be introduced into host cells through conventional transfection or transformation techniques. Exemplary host cells are E. coli cells, Chinese hamster ovary (CHO) cells, human embryonic kidney 293 (HEK 293) cells, HeLa cells, baby hamster kidney (BHK) cells, monkey kidney cells (COS), human hepatocellular carcinoma cells (e.g., Hep G2), and myeloma cells that do not otherwise produce IgG protein. Transformed host cells can be grown under conditions that permit the host cells to express the genes that encode the immunoglobulin light and/or heavy chain variable regions.

[0242] Specific expression and purification conditions will vary depending upon the expression system employed. For example, if a gene is to be expressed in E. coli, it is first cloned into an expression vector by positioning the engineered gene downstream from a suitable bacterial promoter, e.g., Trp or Tac, and a prokaryotic signal sequence. The expressed protein may be secreted. The expressed protein may accumulate in refractile or inclusion bodies, which can be harvested after disruption of the cells by French press or sonication. The refractile bodies then are solubilized, and the protein may be refolded and/or cleaved by methods known in the art.

[0243] If the engineered gene is to be expressed in eukaryotic host cells, e.g., CHO cells, it is first inserted into an expression vector containing a suitable eukaryotic promoter, a secretion signal, a poly A sequence, and a stop codon. Optionally, the vector or gene construct may contain enhancers and introns. In embodiments involving fusion proteins comprising an antibody or portion thereof, the expression vector optionally contains sequences encoding all or part of a constant region, enabling an entire, or a part of, a heavy or light chain to be expressed. The gene construct can be introduced into eukaryotic host cells using conventional techniques.

[0244] The host cells express a recombinant human sialidase or a fusion protein and/or antibody conjugate comprising a sialidase and V_{L} or V_{H} fragments, V_{L}-V_{H} heterodimers, V_{H}-V_{L} or V_{L}-V_{H} single chain polypeptides, complete heavy or light immunoglobulin chains, or portions thereof, each of which may be attached to a moiety having another function (e.g., cytotoxicity). In some embodiments involving fusion proteins and/or antibody conjugates, a host cell is transfected with a single vector expressing a polypeptide expressing a sialidase and an entire, or part of, a heavy chain (e.g., a heavy chain variable region) or a sialidase and a light chain (e.g., a light chain variable region), or a polypeptide expressing an entire, or part of, a heavy chain (e.g., a heavy chain variable region) or a light chain (e.g., a light chain variable region). In some embodiments, a host cell is transfected with a single vector encoding (a) a polypeptide comprising a heavy chain variable region and a polypeptide comprising a light chain variable region, or (b) an entire immunoglobulin heavy chain and an entire immunoglobulin light chain, wherein in (a) or in (b), the polypeptide may also comprise a sialidase. In some embodiments, a host cell is co-transfected with more than one expression vector (e.g., one expression vector expressing a polypeptide comprising an entire, or part of, a heavy chain or heavy chain variable region, optionally comprising a sialidase fused thereto, and another expression vector expressing a polypeptide comprising an entire, or part of, a light chain or light chain variable region, optionally comprising a sialidase fused thereto).

[0245] A polypeptide comprising a sialidase or a fusion protein, e.g., a fusion protein comprising an immunoglobulin heavy chain variable region or light chain variable region, can be produced by growing (culturing) a host cell transfected with an expression vector encoding such a variable region, under conditions that permit expression of the polypeptide. Following expression, the polypeptide can be harvested and purified or isolated using techniques known in the art, e.g., affinity tags such as glutathione-S-transferase (GST) or histidine tags.

[0246] In embodiments in which a fusion protein and/or antibody conjugate is produced, a sialidase fused to a monoclonal antibody, Fc domain, or an antigen-binding domain of the antibody, can be produced by growing (culturing) a host cell transfected with: (a) an expression vector that encodes a complete or partial immunoglobulin heavy chain, and a separate expression vector that encodes a complete or partial immunoglobulin light chain; or (b) a single expression vector that encodes both chains (e.g., complete or partial heavy and light chains), under conditions that permit expression of both chains. The sialidase will be fused to one or more of the chains. The intact fusion protein and/or antibody conjugate can be harvested and purified or isolated using techniques known in the art, e.g., Protein A, Protein G, affinity tags such as glutathione-S-transferase (GST) or histidine tags. It is within ordinary skill in the art to express the heavy chain and the light chain from a single expression vector or from two separate expression vectors.

[0247] In certain embodiments, in order to express a protein, e.g., a recombinant human sialidase, as a secreted protein, a native N-terminal signal sequence of the protein is replaced, e.g., with MDMRVPAQLLGLLLLWLPGARC (SEQ ID NO: 28). In certain embodiments, to express a protein, e.g., a recombinant human sialidase, as a secreted protein, an N-terminal signal sequence, e.g., MDMRVPAQLLGLLLLWLPGARC (SEQ ID NO: 28), is added. Additional exemplary N-terminal signal sequences include signal sequences from interleukin-2, CD-5, IgG kappa light chain, trypsinogen, serum albumin, and prolactin. In certain embodiments, in order to express a protein, e.g., a recombinant human sialidase, as a secreted protein, a C terminal lysosomal signal motif, e.g., YGTL (SEQ ID NO: 29) is removed.

[0248] Methods for reducing or eliminating the antigenicity of antibodies and antibody fragments are known in the art. When the antibodies are to be administered to a human, the antibodies preferably are “humanized” to reduce or eliminate antigenicity in humans. Preferably, each humanized antibody has the same or substantially the same affinity for the antigen as the non-humanized mouse antibody from which it was derived.

[0249] In one humanization approach, chimeric proteins are created in which mouse immunoglobulin constant regions are replaced with human immunoglobulin constant regions. See, e.g., Morrison et al., 1984, PROC. NAT. ACAD. SCI. 81:6851-6855, Neuberger et al., 1984, NATURE 312:604-608; U.S. Pat. No. 6,893,625 (Robinson); U.S. Pat. No. 5,500,362 (Robinson); and U.S. Pat. No. 4,816,567 (Cabilly).

[0250] In an approach known as CDR grafting, the CDRs of the light and heavy chain variable regions are grafted into frameworks from another species. For example, murine CDRs can be grafted into human FRs. In some embodiments, the CDRs of the light and heavy chain variable regions of an antibody are grafted into human FRs or consensus human FRs. To create consensus human FRs, FRs from several human heavy chain or light chain amino acid sequences are aligned to identify a consensus amino acid sequence. CDR grafting is described in U.S. Pat. No. 7,022,500 (Queen); U.S. Pat. No. 6,982,321 (Winter); U.S. Pat. No. 6,180,370 (Queen); U.S. Pat. No. 6,054,297 (Carter); U.S. Pat. No. 5,693,762 (Queen); U.S. Pat. No. 5,859,205 (Adair); U.S. Pat. No. 5,693,761 (Queen); U.S. Pat. No. 5,565,332 (Hoogenboom); U.S. Pat. No. 5,585,089 (Queen); U.S. Pat. No. 5,530,101 (Queen); Jones et al. (1986) NATURE 321: 522-525; Riechmann et al. (1988) NATURE 332: 323-327; Verhoeyen et al. (1988) SCIENCE 239: 1534-1536; and Winter (1998) FEBS LETT 430: 92-94.

[0251] In an approach called “SUPERHUMANIZATION™,” human CDR sequences are chosen from human germline genes, based on the structural similarity of the human CDRs to those of the mouse antibody to be humanized. See, e.g., U.S. Pat. No. 6,881,557 (Foote); and Tan et al., 2002, J. IMMUNOL. 169:1119-1125.

[0252] Other methods to reduce immunogenicity include “reshaping,” “hyperchimerization,” and “veneering/resurfacing.” See, e.g., Vaswami et al., 1998, ANNALS OF ALLERGY, ASTHMA, & IMMUNOL. 81:105; Roguska et al., 1996, PROT. ENGINEER 9:895-904; and U.S. Pat. No. 6,072,035 (Hardman). In the veneering/resurfacing approach, the surface accessible amino acid residues in the murine antibody are replaced by amino acid residues more frequently found at the same positions in a human antibody. This type of antibody resurfacing is described, e.g., in U.S. Pat. No. 5,639,641 (Pedersen).

[0253] Another approach for converting a mouse antibody into a form suitable for medical use in humans is known as ACTIVMAB™ technology (Vaccinex, Inc., Rochester, N.Y.), which involves a vaccinia virus-based vector to express antibodies in mammalian cells. High levels of combinatorial diversity of IgG heavy and light chains can be produced. See, e.g., U.S. Pat. No. 6,706,477 (Zauderer); U.S. Pat. No. 6,800,442 (Zauderer); and U.S. Pat. No. 6,872,518 (Zauderer). Another approach for converting a mouse antibody into a form suitable for use in humans is technology practiced commercially by KaloBios Pharmaceuticals, Inc. (Palo Alto, Calif.). This technology involves the use of a proprietary human “acceptor” library to produce an “epitope focused” library for antibody selection. Another approach for modifying a mouse antibody into a form suitable for medical use in humans is HUMAN ENGINEERING™ technology, which is practiced commercially by XOMA (US) LLC. See, e.g., International (PCT) Publication No. WO 93/11794 and U.S. Pat. No. 5,766,886 (Studnicka); U.S. Pat. No. 5,770,196 (Studnicka); U.S. Pat. No. 5,821,123 (Studnicka); and U.S. Pat. No. 5,869,619 (Studnicka).

[0254] Any suitable approach, including any of the above approaches, can be used to reduce or eliminate human immunogenicity of an antibody.

[0255] In addition, it is possible to create fully human antibodies in mice. Fully human mAbs lacking any non-human sequences can be prepared from human immunoglobulin transgenic mice by techniques referenced in, e.g., Lonberg et al., NATURE 368:856-859, 1994; Fishwild et al., NATURE BIOTECHNOLOGY 14:845-851, 1996; and Mendez et al., NATURE GENETICS 15:146-156, 1997. Fully human monoclonal antibodies can also be prepared and optimized from phage display libraries by techniques referenced in, e.g., Knappik et al., J. MOL. BIOL. 296:57-86, 2000; and Krebs et al., J. IMMUNOL. METH. 254:67-84 2001).

[0256] The present invention encompasses fusion proteins comprising antibody fragments, which may be generated by traditional means, such as enzymatic digestion, or by recombinant techniques. For a review of certain antibody fragments, see Hudson et al. (2003) NAT. MED. 9:129-134.

[0257] Various techniques have been developed for the production of antibody fragments. Traditionally, these fragments were derived via proteolytic digestion of intact antibodies (see, e.g., Morimoto et al. (1992) JOURNAL OF BIOCHEMICAL AND BIOPHYSICAL METHODS 24:107-117; and Brennan et al. (1985) SCIENCE 229:81). However, these fragments can now be produced directly by recombinant host cells. Fab, Fv and ScFv antibody fragments can all be expressed in and secreted from E. coli, thus allowing the facile production of large amounts of these fragments. Antibody fragments can be isolated from the antibody phage libraries. Alternatively, Fab′-SH fragments can be directly recovered from E. coli and chemically coupled to form F(ab′)₂ fragments (Carter et al. (1992) BIO/TECHNOLOGY 10:163-167). According to another approach, F(ab′)₂ fragments can be isolated directly from recombinant host cell culture. Fab and F(ab′)₂ fragments with increased in vivo half-life comprising salvage receptor binding epitope residues are described in U.S. Pat. No. 5,869,046. Other techniques for the production of antibody fragments will be apparent to the skilled practitioner. In certain embodiments, an antibody is a single chain Fv fragment (scFv). See U.S. Pat. Nos. 5,571,894 and 5,587,458.

[0258] Methods for making bispecific antibodies are known in the art. See Milstein and Cuello (1983) NATURE 305:537, International (PCT) Publication No. WO93/08829, and Traunecker et al. (1991) EMBO J., 10:3655. For further details of generating bispecific antibodies see, for example, Suresh et al. (1986) METHODS ENZYMOL. 121:210. Bispecific antibodies include cross-linked or “heteroconjugate” or “heterodimer” antibodies. For example, one of the antibodies in the heterodimer can be coupled to avidin, the other to biotin. Heterodimer antibodies may be made using any convenient cross-linking method. Suitable cross-linking agents are well known in the art, and are disclosed in U.S. Pat. No. 4,676,980, along with a number of cross-linking techniques.

[0259] Examples of heterodimeric or asymmetric IgG-like molecules include but are not limited to those obtained with the following technologies or using the following formats: Triomab/Quadroma, Knobs-into-Holes, CrossMabs, electrostatically-matched antibodies, LUZ-Y, Strand Exchange Engineered Domain body, Biclonic and DuoBody.

[0260] Advantages of using antibody fragments (e.g., F(ab) and F(ab′)₂ fragments) include the elimination of non-specific binding between Fc portions of antibodies and Fc receptors on cells (such as macrophages, dendritic cells, neutrophils, NK cells and B cells). In addition, they may be able to penetrate tissues more efficiently due to their smaller size.

[0261] Heterodimeric antibodies, or asymmetric antibodies, allow for greater flexibility and new formats for attaching a variety of drugs to the antibody arms. One of the general formats for creating a heterodimeric antibody is the “knobs-into-holes” format. This format is specific to the heavy chain part of the constant region in antibodies. The “knobs” part is engineered by replacing a small amino acid with a larger one, which fits into a “hole”, which is engineered by replacing a large amino acid with a smaller one. What connects the “knobs” to the “holes” are the disulfide bonds between each chain. The “knobs-into-holes” shape facilitates antibody dependent cell mediated cytotoxicity. Single chain variable fragments (scFv) are connected to the variable domain of the heavy and light chain via a short linker peptide. The linker is rich in glycine, which gives it more flexibility, and serine/threonine, which gives it specificity. Two different scFv fragments can be connected together, via a hinge region, to the constant domain of the heavy chain or the constant domain of the light chain. This gives the antibody bispecificity, allowing for the binding specificities of two different antigens. The “knobs-into-holes” format enhances heterodimer formation but doesn't suppress homodimer formation.

[0262] Several approaches to support heterodimerization have been described, for example in International (PCT) Publication Nos. WO96/27011, WO98/050431, WO2007/110205, WO2007/147901, WO2009/089004, WO2010/129304, WO2011/90754, WO2011/143545, WO2012/058768, WO2013/157954, and WO2013/096291, and European Patent Publication No. EP1870459. Typically, in the approaches known in the art, the CH₃ domain of the first heavy chain and the CH₃ domain of the second heavy chain are both engineered in a complementary manner so that the heavy chain comprising one engineered CH₃ domain can no longer homodimerize with another heavy chain of the same structure (e.g. a CH3-engineered first heavy chain can no longer homodimerize with another CH₃-engineered first heavy chain; and a CH₃-engineered second heavy chain can no longer homodimerize with another CH₃-engineered second heavy chain). Thereby the heavy chain comprising one engineered CH₃ domain is forced to heterodimerize with another heavy chain comprising the CH₃ domain, which is engineered in a complementary manner. As a result, the CH₃ domain of the first heavy chain and the CH₃ domain of the second heavy chain are engineered in a complementary manner by amino acid substitutions, such that the first heavy chain and the second heavy chain are forced to heterodimerize, whereas the first heavy chain and the second heavy chain can no longer homodimerize (e.g., for steric reasons).

### IV. Pharmaceutical Compositions

[0263] For therapeutic use, a recombinant sialidase (e.g., human sialidase) or a fusion protein and/or antibody conjugate thereof preferably is combined with a pharmaceutically acceptable carrier. The term “pharmaceutically acceptable” as used herein refers to those compounds, materials, compositions, and/or dosage forms which are, within the scope of sound medical judgment, suitable for use in contact with the tissues of human beings and animals without excessive toxicity, irritation, allergic response, or other problem or complication, commensurate with a reasonable benefit/risk ratio.

[0264] The term “pharmaceutically acceptable carrier” as used herein refers to buffers, carriers, and excipients suitable for use in contact with the tissues of human beings and animals without excessive toxicity, irritation, allergic response, or other problem or complication, commensurate with a reasonable benefit/risk ratio. Pharmaceutically acceptable carriers include any of the standard pharmaceutical carriers, such as a phosphate buffered saline solution, water, emulsions (e.g., such as an oil/water or water/oil emulsions), and various types of wetting agents. The compositions also can include stabilizers and preservatives. For examples of carriers, stabilizers and adjuvants, see, e.g., Martin, Remington's Pharmaceutical Sciences, 15th Ed., Mack Publ. Co., Easton, Pa. [1975]. Pharmaceutically acceptable carriers include buffers, solvents, dispersion media, coatings, isotonic and absorption delaying agents, and the like, that are compatible with pharmaceutical administration. The use of such media and agents for pharmaceutically active substances is known in the art.

[0265] In certain embodiments, a pharmaceutical composition may contain formulation materials for modifying, maintaining or preserving, for example, the pH, osmolarity, viscosity, clarity, color, isotonicity, odor, sterility, stability, rate of dissolution or release, adsorption or penetration of the composition. In such embodiments, suitable formulation materials include, but are not limited to, amino acids (such as glycine, glutamine, asparagine, arginine or lysine); antimicrobials; antioxidants (such as ascorbic acid, sodium sulfite or sodium hydrogen-sulfite); buffers (such as borate, bicarbonate, Tris-HCl, citrates, phosphates or other organic acids); bulking agents (such as mannitol or glycine); chelating agents (such as ethylenediamine tetraacetic acid (EDTA)); complexing agents (such as caffeine, polyvinylpyrrolidone, beta-cyclodextrin or hydroxypropyl-beta-cyclodextrin); fillers; monosaccharides; disaccharides; and other carbohydrates (such as glucose, mannose or dextrins); proteins (such as serum albumin, gelatin or immunoglobulins); coloring, flavoring and diluting agents; emulsifying agents; hydrophilic polymers (such as polyvinylpyrrolidone); low molecular weight polypeptides; salt-forming counterions (such as sodium); preservatives (such as benzalkonium chloride, benzoic acid, salicylic acid, thimerosal, phenethyl alcohol, methylparaben, propylparaben, chlorhexidine, sorbic acid or hydrogen peroxide); solvents (such as glycerin, propylene glycol or polyethylene glycol); sugar alcohols (such as mannitol or sorbitol); suspending agents; surfactants or wetting agents (such as pluronics, PEG, sorbitan esters, polysorbates such as polysorbate 20, polysorbate, triton, tromethamine, lecithin, cholesterol, tyloxapal); stability enhancing agents (such as sucrose or sorbitol); tonicity enhancing agents (such as alkali metal halides, preferably sodium or potassium chloride, mannitol sorbitol); delivery vehicles; diluents; excipients and/or pharmaceutical adjuvants (see, Remington's Pharmaceutical Sciences, 18th ed. (Mack Publishing Company, 1990).

[0266] In certain embodiments, a pharmaceutical composition may contain nanoparticles, e.g., polymeric nanoparticles, liposomes, or micelles (See Anselmo et al. (2016) BIOENG. TRANSL. MED. 1: 10-29).

[0267] In certain embodiments, a pharmaceutical composition may contain a sustained- or controlled-delivery formulation. Techniques for formulating sustained- or controlled-delivery means, such as liposome carriers, bio-erodible microparticles or porous beads and depot injections, are also known to those skilled in the art. Sustained-release preparations may include, e.g., porous polymeric microparticles or semipermeable polymer matrices in the form of shaped articles, e.g., films, or microcapsules. Sustained release matrices may include polyesters, hydrogels, polylactides, copolymers of L-glutamic acid and gamma ethyl-L-glutamate, poly (2-hydroxyethyl-methacrylate), ethylene vinyl acetate, or poly-D(−)-3-hydroxybutyric acid. Sustained release compositions may also include liposomes that can be prepared by any of several methods known in the art.

[0268] Pharmaceutical compositions containing a recombinant human sialidase, a recombinant human sialidase fusion protein, or an antibody conjugate disclosed herein can be presented in a dosage unit form and can be prepared by any suitable method. A pharmaceutical composition should be formulated to be compatible with its intended route of administration. Examples of routes of administration are intravenous (IV), intradermal, inhalation, transdermal, topical, transmucosal, intrathecal and rectal administration. In certain embodiments, a recombinant human sialidase, a recombinant human sialidase fusion protein, or an antibody conjugate disclosed herein is administered by IV infusion. In certain embodiments, a recombinant human sialidase, a recombinant human sialidase fusion protein, or an antibody conjugate disclosed herein is administered by intratumoral injection. Useful formulations can be prepared by methods known in the pharmaceutical art. For example, see Remington's Pharmaceutical Sciences, 18th ed. (Mack Publishing Company, 1990). Formulation components suitable for parenteral administration include a sterile diluent such as water for injection, saline solution, fixed oils, polyethylene glycols, glycerin, propylene glycol or other synthetic solvents; antibacterial agents such as benzyl alcohol or methyl parabens; antioxidants such as ascorbic acid or sodium bisulfite; chelating agents such as EDTA; buffers such as acetates, citrates or phosphates; and agents for the adjustment of tonicity such as sodium chloride or dextrose.

[0269] For intravenous administration, suitable carriers include physiological saline, bacteriostatic water, Cremophor EL™ (BASF, Parsippany, N.J.) or phosphate buffered saline (PBS). The carrier should be stable under the conditions of manufacture and storage, and should be preserved against microorganisms. The carrier can be a solvent or dispersion medium containing, for example, water, ethanol, polyol (for example, glycerol, propylene glycol, and liquid polyethylene glycol), and suitable mixtures thereof.

[0270] In certain embodiments, a pharmaceutical composition may contain a stabilizing agent. In certain embodiments, the stabilizing agent is a cation, such as a divalent cation. In certain embodiments, the cation is calcium or magnesium. The cation can be in the form of a salt, such as calcium chloride (CaCl₂) or magnesium chloride (MgCl₂).

[0271] In certain embodiments, the stabilizing agent is present in an amount from about 0.05 mM to about 5 mM. For example, the stabilizing agent may be present in an amount of from about 0.05 mM to about 4 mM, from about 0.05 mM to about 3 mM, from about 0.05 mM to about 2 mM, from about 0.05 mM to about 1 mM, from about 0.05 mM to about 0.5 mM, from about 0.5 mM to about 4 mM, from about 0.5 mM to about 3 mM, from about 0.5 mM to about 2 mM, from about 0.5 mM to about 1 mM, from about 1 mM to about 4 mM, from about 1 mM to about 3 mM, of from about 1 mM to about 2 mM.

[0272] Pharmaceutical formulations preferably are sterile. Sterilization can be accomplished by any suitable method, e.g., filtration through sterile filtration membranes. Where the composition is lyophilized, filter sterilization can be conducted prior to or following lyophilization and reconstitution.

[0273] The compositions described herein may be administered locally or systemically. Administration will generally be parenteral administration. In a preferred embodiment, the pharmaceutical composition is administered subcutaneously and in an even more preferred embodiment intravenously. Preparations for parenteral administration include sterile aqueous or non-aqueous solutions, suspensions, and emulsions.

[0274] Generally, a therapeutically effective amount of active component, for example, a recombinant human sialidase or fusion protein and/or antibody conjugate thereof, is in the range of 0.1 mg/kg to 100 mg/kg, e.g., 1 mg/kg to 100 mg/kg, 1 mg/kg to 10 mg/kg. The amount administered will depend on variables such as the type and extent of disease or indication to be treated, the overall health of the patient, the in vivo potency of the antibody, the pharmaceutical formulation, and the route of administration. The initial dosage can be increased beyond the upper level in order to rapidly achieve the desired blood-level or tissue-level. Alternatively, the initial dosage can be smaller than the optimum, and the daily dosage may be progressively increased during the course of treatment. Human dosage can be optimized, e.g., in a conventional Phase I dose escalation study designed to run from 0.5 mg/kg to 20 mg/kg. Dosing frequency can vary, depending on factors such as route of administration, dosage amount, serum half-life of the recombinant human sialidase or fusion protein and/or antibody conjugate thereof, and the disease being treated. Exemplary dosing frequencies are once per day, once per week and once every two weeks. A preferred route of administration is parenteral, e.g., intravenous infusion. In certain embodiments, a recombinant human sialidase or a fusion protein and/or antibody conjugate thereof is lyophilized, and then reconstituted in buffered saline, at the time of administration.

### V. Therapeutic Uses

[0275] The compositions and methods disclosed herein can be used to treat various forms of cancer in a subject or inhibit cancer growth in a subject. The invention provides a method of treating a cancer in a subject. The method comprises administering to the subject an effective amount of a recombinant human sialidase or a fusion protein and/or antibody conjugate thereof, e.g., a recombinant human sialidase, fusion protein, or antibody conjugate disclosed herein, either alone or in a combination with another therapeutic agent to treat the cancer in the subject. The term “effective amount” as used herein refers to the amount of an active agent (e.g., recombinant human sialidase or fusion protein thereof according to the present invention) sufficient to effect beneficial or desired results. An effective amount can be administered in one or more administrations, applications or dosages and is not intended to be limited to a particular formulation or administration route.

[0276] As used herein, “treat”, “treating” and “treatment” mean the treatment of a disease in a subject, e.g., in a human. This includes: (a) inhibiting the disease, i.e., arresting its development; and (b) relieving the disease, i.e., causing regression of the disease state. As used herein, the terms “subject” and “patient” refer to an organism to be treated by the methods and compositions described herein. Such organisms preferably include, but are not limited to, mammals (e.g., murines, simians, equines, bovines, porcines, canines, felines, and the like), and more preferably includes humans.

[0277] Examples of cancers include solid tumors, soft tissue tumors, hematopoietic tumors and metastatic lesions. Examples of hematopoietic tumors include, leukemia, acute leukemia, acute lymphoblastic leukemia (ALL), B-cell, T-cell or FAB ALL, acute myeloid leukemia (AML), chronic myelocytic leukemia (CIVIL), chronic lymphocytic leukemia (CLL), e.g., transformed CLL, diffuse large B-cell lymphomas (DLBCL), follicular lymphoma, hairy cell leukemia, myelodyplastic syndrome (MDS), a lymphoma, Hodgkin's disease, a malignant lymphoma, non-Hodgkin's lymphoma, Burkitt's lymphoma, multiple myeloma, or Richter's Syndrome (Richter's Transformation). Examples of solid tumors include malignancies, e.g., sarcomas, adenocarcinomas, and carcinomas, of the various organ systems, such as those affecting head and neck (including pharynx), thyroid, lung (small cell or non-small cell lung carcinoma (NSCLC)), breast, lymphoid, gastrointestinal (e.g., oral, esophageal, stomach, liver, pancreas, small intestine, colon and rectum, anal canal), genitals and genitourinary tract (e.g., renal, urothelial, bladder, ovarian, uterine, cervical, endometrial, prostate, testicular), CNS (e.g., neural or glial cells, e.g., neuroblastoma or glioma), or skin (e.g., melanoma).

[0278] In certain embodiments the cancer is an epithelial cancer, e.g., an epithelial cancer that upregulates the expression of sialylated glycans. Exemplary epithelial cancers include, but are not limited to, endometrial cancer, colon cancer, ovarian cancer, cervical cancer, vulvar cancer, uterine cancer or fallopian tube cancer, breast cancer, prostate cancer, lung cancer, pancreatic cancer, urinary cancer, bladder cancer, head and neck cancer, oral cancer and liver cancer. Epithelial cancers also include carcinomas, for example, acinar carcinoma, acinous carcinoma, adenocystic carcinoma, adenoid cystic carcinoma, carcinoma adenomatosum, carcinoma of adrenal cortex, alveolar carcinoma, alveolar cell carcinoma, basal cell carcinoma, carcinoma basocellulare, basaloid carcinoma, baso squamous cell carcinoma, bronchioalveolar carcinoma, bronchiolar carcinoma, bronchogenic carcinoma, cerebriform carcinoma, cholangiocellular carcinoma, chorionic carcinoma, colloid carcinoma, comedo carcinoma, corpus carcinoma, cribriform carcinoma, carcinoma en cuirasse, carcinoma cutaneum, cylindrical carcinoma, cylindrical cell carcinoma, duct carcinoma, carcinoma durum, embryonal carcinoma, encephaloid carcinoma, epiermoid carcinoma, carcinoma epitheliale adenoides, exophytic carcinoma, carcinoma ex ulcere, carcinoma fibrosum, gelatiniforni carcinoma, gelatinous carcinoma, giant cell carcinoma, carcinoma gigantocellulare, glandular carcinoma, granulosa cell carcinoma, hair-matrix carcinoma, hematoid carcinoma, hepatocellular carcinoma, Hurthle cell carcinoma, hyaline carcinoma, hypemephroid carcinoma, infantile embryonal carcinoma, carcinoma in situ, intraepidermal carcinoma, intraepithelial carcinoma, Krompecher's carcinoma, Kulchitzky-cell carcinoma, large-cell carcinoma, lenticular carcinoma, carcinoma lenticulare, lipomatous carcinoma, lymphoepithelial carcinoma, carcinoma medullare, medullary carcinoma, melanotic carcinoma, carcinoma molle, mucinous carcinoma, carcinoma muciparum, carcinoma mucocellulare, mucoepidermoid carcinoma, carcinoma mucosum, mucous carcinoma, carcinoma myxomatodes, nasopharyngeal carcinoma, oat cell carcinoma, carcinoma ossifi cans, osteoid carcinoma, papillary carcinoma, periportal carcinoma, preinvasive carcinoma, prickle cell carcinoma, pultaceous carcinoma, renal cell carcinoma of kidney, reserve cell carcinoma, carcinoma sarcomatodes, schneiderian carcinoma, scirrhous carcinoma, carcinoma scroti, signet-ring cell carcinoma, carcinoma simplex, small-cell carcinoma, solanoid carcinoma, spheroidal cell carcinoma, spindle cell carcinoma, carcinoma spongiosum, squamous carcinoma, squamous cell carcinoma, string carcinoma, carcinoma telangiectaticum, carcinoma telangiectodes, transitional cell carcinoma, carcinoma tuberosum, tuberous carcinoma, verrucous carcinoma, and carcinoma villosum.

[0279] In certain embodiments, the cancer is breast cancer. In certain embodiments, the cancer is an adenocarcinoma. In certain embodiments, the cancer is a metastatic cancer. In certain embodiments, the cancer is a refractory cancer.

[0280] In certain embodiments, the cancer is resistant to or non-responsive to treatment with an antibody, e.g., an antibody with ADCC activity, e.g., trastuzumab.

[0281] The methods and compositions described herein can be used alone or in combination with other therapeutic agents and/or modalities. The term administered “in combination,” as used herein, is understood to mean that two (or more) different treatments are delivered to the subject during the course of the subject's affliction with the disorder, such that the effects of the treatments on the patient overlap at a point in time. In certain embodiments, the delivery of one treatment is still occurring when the delivery of the second begins, so that there is overlap in terms of administration. This is sometimes referred to herein as “simultaneous” or “concurrent delivery.” In other embodiments, the delivery of one treatment ends before the delivery of the other treatment begins. In certain embodiments of either case, the treatment is more effective because of combined administration. For example, the second treatment is more effective, e.g., an equivalent effect is seen with less of the second treatment, or the second treatment reduces symptoms to a greater extent, than would be seen if the second treatment were administered in the absence of the first treatment, or the analogous situation is seen with the first treatment. In certain embodiments, delivery is such that the reduction in a symptom, or other parameter related to the disorder is greater than what would be observed with one treatment delivered in the absence of the other. The effect of the two treatments can be partially additive, wholly additive, or greater than additive. The delivery can be such that an effect of the first treatment delivered is still detectable when the second is delivered.

[0282] In certain embodiments, a method or composition described herein, is administered in combination with one or more additional therapies, e.g., surgery, radiation therapy, or administration of another therapeutic preparation. In certain embodiments, the additional therapy may include chemotherapy, e.g., a cytotoxic agent. In certain embodiments the additional therapy may include a targeted therapy, e.g. a tyrosine kinase inhibitor, a proteasome inhibitor, or a protease inhibitor. In certain embodiments, the additional therapy may include an anti-inflammatory, anti-angiogenic, anti-fibrotic, or anti-proliferative compound, e.g., a steroid, a biologic immunomodulator, a monoclonal antibody, an antibody fragment, an aptamer, an siRNA, an antisense molecule, a fusion protein, a cytokine, a cytokine receptor, a bronchodilator, a statin, an anti-inflammatory agent (e.g. methotrexate), or an NSAID. In certain embodiments, the additional therapy may include a combination of therapeutics of different classes.

[0283] In certain embodiments, a method or composition described herein is administered in combination with a checkpoint inhibitor. The checkpoint inhibitor may, for example, be selected from a PD-1 antagonist, PD-L1 antagonist, CTLA-4 antagonist, adenosine A2A receptor antagonist, B7-H3 antagonist, B7-H4 antagonist, BTLA antagonist, KIR antagonist, LAG3 antagonist, TIM-3 antagonist, VISTA antagonist, and TIGIT antagonist.

[0284] In certain embodiments, the checkpoint inhibitor is a PD-1 or PD-L1 inhibitor. PD-1 is a receptor present on the surface of T-cells that serves as an immune system checkpoint that inhibits or otherwise modulates T-cell activity at the appropriate time to prevent an overactive immune response. Cancer cells, however, can take advantage of this checkpoint by expressing ligands, for example, PD-L1, that interact with PD-1 on the surface of T-cells to shut down or modulate T-cell activity. Exemplary PD-1/PD-L1 based immune checkpoint inhibitors include antibody based therapeutics. Exemplary treatment methods that employ PD-1/PD-L1 based immune checkpoint inhibition are described in U.S. Pat. Nos. 8,728,474 and 9,073,994, and EP Patent No. 1537878B1, and, for example, include the use of anti-PD-1 antibodies. Exemplary anti-PD-1 antibodies are described, for example, in U.S. Pat. Nos. 8,952,136, 8,779,105, 8,008,449, 8,741,295, 9,205,148, 9,181,342, 9,102,728, 9,102,727, 8,952,136, 8,927,697, 8,900,587, 8,735,553, and 7,488,802. Exemplary anti-PD-1 antibodies include, for example, nivolumab (Opdivo®, Bristol-Myers Squibb Co.), pembrolizumab (Keytruda®, Merck Sharp & Dohme Corp.), PDR001 (Novartis Pharmaceuticals), and pidilizumab (CT-011, Cure Tech). Exemplary anti-PD-L1 antibodies are described, for example, in U.S. Pat. Nos. 9,273,135, 7,943,743, 9,175,082, 8,741,295, 8,552,154, and 8,217,149. Exemplary anti-PD-L1 antibodies include, for example, atezolizumab (Tecentriq®, Genentech), durvalumab (AstraZeneca), MEDI4736, avelumab, and BMS 936559 (Bristol Myers Squibb Co.).

[0285] In certain embodiments, a method or composition described herein is administered in combination with a CTLA-4 inhibitor. In the CTLA-4 pathway, the interaction of CTLA-4 on a T-cell with its ligands (e.g., CD80, also known as B7-1, and CD86) on the surface of an antigen presenting cells (rather than cancer cells) leads to T-cell inhibition. Exemplary CTLA-4 based immune checkpoint inhibition methods are described in U.S. Pat. Nos. 5,811,097, 5,855,887, 6,051,227. Exemplary anti-CTLA-4 antibodies are described in U.S. Pat. Nos. 6,984,720, 6,682,736, 7,311,910; 7,307,064, 7,109,003, 7,132,281, 6,207,156, 7,807,797, 7,824,679, 8,143,379, 8,263,073, 8,318,916, 8,017,114, 8,784,815, and 8,883,984, International (PCT) Publication Nos. WO98/42752, WO00/37504, and WO01/14424, and European Patent No. EP 1212422 B1. Exemplary CTLA-4 antibodies include ipilimumab or tremelimumab.

[0286] In certain embodiments, a method or composition described herein is administered in combination with (i) a PD-1 or PD-L1 inhibitor, e.g., a PD-1 or PD-L1 inhibitor disclosed herein, and (ii) CTLA-4 inhibitor, e.g., a CTLA-4 inhibitor disclosed herein.

[0287] In certain embodiments, a method or composition described herein is administered in combination with an DO inhibitor. Exemplary IDO inhibitors include 1-methyl-D-tryptophan (known as indoximod), epacadostat (INCB24360), navoximod (GDC-0919), and BMS-986205.

[0288] Exemplary cytotoxic agents that can be administered in combination with a method or composition described herein include, for example, antimicrotubule agents, topoisomerase inhibitors, antimetabolites, protein synthesis and degradation inhibitors, mitotic inhibitors, alkylating agents, platinating agents, inhibitors of nucleic acid synthesis, histone deacetylase inhibitors (HDAC inhibitors, e.g., vorinostat (SAHA, MK0683), entinostat (MS-275), panobinostat (LBH589), trichostatin A (TSA), mocetinostat (MGCD0103), belinostat (PXD101), romidepsin (FK228, depsipeptide)), DNA methyltransferase inhibitors, nitrogen mustards, nitrosoureas, ethylenimines, alkyl sulfonates, triazenes, folate analogs, nucleoside analogs, ribonucleotide reductase inhibitors, vinca alkaloids, taxanes, epothilones, intercalating agents, agents capable of interfering with a signal transduction pathway, agents that promote apoptosis and radiation, or antibody molecule conjugates that bind surface proteins to deliver a toxic agent. In one embodiment, the cytotoxic agent that can be administered with a method or composition described herein is a platinum-based agent (such as cisplatin), cyclophosphamide, dacarbazine, methotrexate, fluorouracil, gemcitabine, capecitabine, hydroxyurea, topotecan, irinotecan, azacytidine, vorinostat, ixabepilone, bortezomib, taxanes (e.g., paclitaxel or docetaxel), cytochalasin B, gramicidin D, ethidium bromide, emetine, mitomycin, etoposide, tenoposide, vincristine, vinblastine, vinorelbine, colchicin, anthracyclines (e.g., doxorubicin or epirubicin) daunorubicin, dihydroxy anthracin dione, mitoxantrone, mithramycin, actinomycin D, adriamycin, 1-dehydrotestosterone, glucocorticoids, procaine, tetracaine, lidocaine, propranolol, puromycin, ricin, or maytansinoids.

[0289] The invention also provides a method of increasing the expression of HLA-DR, CD86, CD83, IFNγ, IL-1b, IL-6, TNFα, IL-17A, IL-2, or IL-6 in a cell, tissue, or subject. The method comprises contacting the cell, tissue, or subject with an effective amount of a sialidase, fusion protein, and/or antibody conjugate, e.g., a sialidase, fusion protein, or antibody conjugate disclosed herein. In certain embodiments, the cell is selected from a dendritic cell and a peripheral blood mononuclear cell (PBMC).

[0290] In certain embodiments, expression of HLA-DR, CD86, CD83, IFNγ, IL-1b, IL-6, TNFα, IL-17A, IL-2, or IL-6 in the cell, tissue, or subject is increased by at least about 10%, at least about 20%, at least about 50%, at least about 75%, at least about 100%, at least about 150%, at least about 200%, at least about 250%, at least about 300%, at least about 400%, at least about 500%, at least about 600%, at least about 700%, at least about 800%, at least about 900%, or at least about 1,000%, relative to a similar or otherwise identical cell or tissue that has not been contacted with the sialidase, fusion protein, or antibody conjugate. Gene expression may be measured by any suitable method known in the art, for example, by ELISA, or by Luminex multiplex assays.

[0291] The invention also provides a method of promoting infiltration of immune cells into a tumor in a subject in need thereof. The method comprises administering to the subject an effective amount of a sialidase, fusion protein, and/or antibody conjugate, e.g., a sialidase, fusion protein, or antibody conjugate disclosed herein. In certain embodiments, the immune cells are T-cells, e.g., CD4+ and/or CD8+ T-cells, e.g., CD69⁺CD8⁺ and/or GzmB⁺CD8⁺ T-cells. In certain embodiments, the immune cells are natural killer (NK) cells.

[0292] In certain embodiments, the infiltration of immune cells into the tumor in the subject is increased by at least about 10%, at least about 20%, at least about 50%, at least about 75%, at least about 100%, at least about 150%, at least about 200%, at least about 250%, at least about 300%, at least about 400%, at least about 500%, at least about 600%, at least about 700%, at least about 800%, at least about 900%, or at least about 1,000%, relative to a similar or otherwise identical tumor and/or subject that has not been administered the sialidase, fusion protein, or antibody conjugate. Infiltration of immune cells into a tumor may be measured by any suitable method known in the art, for example, antibody staining.

[0293] The invention also provides a method of increasing the amount of circulating natural killer (NK) cells in a subject in need thereof. The method comprises administering to the subject an effective amount of a sialidase, fusion protein, and/or antibody conjugate, e.g., a sialidase, fusion protein, or antibody conjugate disclosed herein, so as to increase the number of circulating NK cells relative to prior to administration of the sialidase, fusion protein, antibody conjugate, or pharmaceutical composition.

[0294] In certain embodiments, the amount of circulating NK cells in the subject is increased by at least about 10%, at least about 20%, at least about 50%, at least about 75%, at least about 100%, at least about 150%, at least about 200%, at least about 250%, at least about 300%, at least about 400%, at least about 500%, at least about 600%, at least about 700%, at least about 800%, at least about 900%, or at least about 1,000%, relative to a similar or otherwise identical subject that has not been administered the sialidase, fusion protein, or antibody conjugate. Circulating NK cells in a subject may be measured by any suitable method known in the art, for example, antibody staining.

[0295] The invention also provides a method of increasing the amount of T-cells in the draining lymph node in a subject in need thereof. The method comprises administering to the subject an effective amount of a sialidase, fusion protein, antibody conjugate, and/or pharmaceutical composition, e.g., a sialidase, fusion protein, antibody conjugate, and/or pharmaceutical composition disclosed herein, so as to increase the number of T-cells in the draining lymph node relative to prior to administration of the sialidase, fusion protein, antibody conjugate, or pharmaceutical composition. In certain embodiments, the immune cells are T-cells, e.g., CD4+ and/or CD8+ T-cells.

[0296] In certain embodiments, the amount of T-cells in the draining lymph node in the subject is increased by at least about 10%, at least about 20%, at least about 50%, at least about 75%, at least about 100%, at least about 150%, at least about 200%, at least about 250%, at least about 300%, at least about 400%, at least about 500%, at least about 600%, at least about 700%, at least about 800%, at least about 900%, or at least about 1,000%, relative to a similar or otherwise identical subject that has not been administered the sialidase, fusion protein, antibody conjugate, or pharmaceutical composition. T-cells in the draining lymph node in a subject may be measured by any suitable method known in the art, for example, antibody staining.

[0297] The invention also provides a method of increasing expression of Cd3, Cd4, Cd8, Cd274, Ctla4, Icos, Pdcd1, Lag3, Il6, Il1b, Il2, Ifng, Ifna1, Mx1, Gzmb, Cxcl9, Cxcl12, and/or Ccl5 in a cell, tissue, or subject. The method comprises contacting the cell, tissue, or subject with an effective amount of a sialidase, fusion protein, antibody conjugate, and/or pharmaceutical composition, e.g., a sialidase, fusion protein, antibody conjugate, and/or pharmaceutical composition disclosed herein, so as to increase the expression of Cd3, Cd4, Cd8, Cd274, Ctla4, Icos, Pdcd1, Lag3, Il6, Il1b, Il2, Ifng, Ifna1, Mx1, Gzmb, Cxcl9, Cxcl12, and/or Ccl5 relative to the cell, tissue or subject prior to contact with the sialidase, fusion protein, antibody conjugate, or pharmaceutical composition.

[0298] In certain embodiments, expression of Cd3, Cd4, Cd8, Cd274, Ctla4, Icos, Pdcd1, Lag3, Il6, Il1b, Il2, Ifng, Ifna1, Mx1, Gzmb, Cxcl9, Cxcl12, and/or Ccl5 in the cell, tissue, or subject is increased by at least about 10%, at least about 20%, at least about 50%, at least about 75%, at least about 100%, at least about 150%, at least about 200%, at least about 250%, at least about 300%, at least about 400%, at least about 500%, at least about 600%, at least about 700%, at least about 800%, at least about 900%, or at least about 1,000%, relative to a similar or otherwise identical cell, tissue, or subject that has not been contacted with the sialidase, fusion protein, antibody conjugate, or pharmaceutical composition. Gene expression may be measured by any suitable method known in the art, for example, by ELISA, Luminex multiplex assays, or Nanostring technology.

[0299] The invention also provides a method of removing sialic acid from a cell or tissue. The method comprises contacting the cell or tissue with an effective amount of a sialidase, fusion protein, and/or antibody conjugate, e.g., a sialidase, fusion protein, or antibody conjugate disclosed herein. The invention also provides a method of removing sialic acid from a cell in a subject, the method comprising administering to the subject an effective amount of a pharmaceutical composition comprising a sialidase, fusion protein, and/or antibody conjugate, e.g., a sialidase, fusion protein, or antibody conjugate disclosed herein, thereby to remove sialic acid from the cell.

[0300] In certain embodiments, the cell is tumor cell, dendritic cell (DC) or monocyte. In certain embodiments, the cell is a monocyte, and the method results in increased expression of an MHC-II molecule (e.g., HLA-DR) on the monocyte. In certain embodiments, expression of an MHC-II molecule in the cell or tissue is increased by at least about 10%, at least about 20%, at least about 50%, at least about 75%, at least about 100%, at least about 150%, at least about 200%, at least about 250%, at least about 300%, at least about 400%, at least about 500%, at least about 600%, at least about 700%, at least about 800%, at least about 900%, or at least about 1,000%, relative to a similar or otherwise identical cell or tissue that has not been contacted with the sialidase, fusion protein, and/or antibody conjugate. Gene expression may be measured by any suitable method known in the art, for example, by ELISA, by Luminex multiplex assays, or by flow cytometry.

[0301] The invention also provides a method of enhancing phagocytosis of a tumor cell. The method comprises contacting the tumor cell with a sialidase, fusion protein, and/or antibody conjugate, e.g., a sialidase, fusion protein, or antibody conjugate disclosed herein, in an amount effective to remove sialic acid from the tumor cell, thereby enhancing phagocytosis of the tumor cell. In certain embodiments, the disclosure relates to a method of increasing phagocytosis of a tumor cell in a subject, the method comprising administering to the subject an effective amount of a pharmaceutical composition comprising a sialidase, fusion protein, and/or antibody conjugate, e.g., a sialidase, fusion protein, or antibody conjugate disclosed herein, in an amount effective to remove sialic acid from the tumor cell, thereby to increase phagocytosis of the tumor cell.

[0302] In certain embodiments, phagocytosis is increased by at least about 10%, at least about 20%, at least about 50%, at least about 75%, at least about 100%, at least about 150%, at least about 200%, at least about 250%, at least about 300%, at least about 400%, at least about 500%, at least about 600%, at least about 700%, at least about 800%, at least about 900%, or at least about 1,000%, relative to a similar or otherwise identical tumor cell or population of tumor cells that has not or have not been contacted with the sialidase, fusion protein, and/or antibody conjugate. Phagocytosis may be measured by any suitable method known in the art.

[0303] The invention also provides a method of activating a dendritic cell (DC). The method comprises contacting the DC with a tumor cell that has been treated with a sialidase, fusion protein, and/or antibody conjugate, e.g., a sialidase, fusion protein, or antibody conjugate disclosed herein. In certain embodiments, the disclosure relates to a method of activating a dendritic cell (DC) or a population of DCs in a subject, the method comprising administering to the subject an amount of a pharmaceutical composition comprising a sialidase, fusion protein, and/or antibody conjugate, e.g., a sialidase, fusion protein or antibody conjugate disclosed herein, effective to remove sialic acid from a tumor cell in the subject, thereby to activate the DC or the population of DCs in the subject.

[0304] In certain embodiments, activation of the DC or a population of DCs is increased by at least about 10%, at least about 20%, at least about 50%, at least about 75%, at least about 100%, at least about 150%, at least about 200%, at least about 250%, at least about 300%, at least about 400%, at least about 500%, at least about 600%, at least about 700%, at least about 800%, at least about 900%, or at least about 1,000%, relative to a similar or otherwise identical DC or population of DCs that has not or have not been contacted with a tumor cell that has been treated with the sialidase, fusion protein, and/or antibody conjugate. Activation may be measured by any suitable method known in the art.

[0305] The invention also provides a method of reducing Siglec-15 binding activity, thereby to increase anti-tumor activity in a tumor microenvironment, the method comprising contacting a T cell with a sialidase, fusion protein, and/or antibody conjugate, e.g., a sialidase, fusion protein, or antibody conjugate disclosed herein. In certain embodiments, the disclosure relates to a method of reducing Siglec-15 binding activity, thereby to increase anti-tumor activity in a tumor microenvironment of a patient, the method comprising administering to the subject an effective amount of a pharmaceutical composition comprising a sialidase, fusion protein, and/or antibody conjugate, e.g., a sialidase, fusion protein, or antibody conjugate disclosed herein, thereby to increase anti-tumor activity (e.g., T cell activity) in the subject.

[0306] In certain embodiments, Siglec-15 binding activity is reduced by at least about 10%, at least about 20%, at least about 50%, at least about 75%, or about 100%, relative to Siglec-15 that has not or have not been contacted with the sialidase, fusion protein, and/or antibody conjugate. Binding may be measured by any suitable method known in the art.

[0307] Throughout the description, where compositions are described as having, including, or comprising specific components, or where processes and methods are described as having, including, or comprising specific steps, it is contemplated that, additionally, there are compositions of the present invention that consist essentially of, or consist of, the recited components, and that there are processes and methods according to the present invention that consist essentially of, or consist of, the recited processing steps.

[0308] In the application, where an element or component is said to be included in and/or selected from a list of recited elements or components, it should be understood that the element or component can be any one of the recited elements or components, or the element or component can be selected from a group consisting of two or more of the recited elements or components.

[0309] Further, it should be understood that elements and/or features of a composition or a method described herein can be combined in a variety of ways without departing from the spirit and scope of the present invention, whether explicit or implicit herein. For example, where reference is made to a particular compound, that compound can be used in various embodiments of compositions of the present invention and/or in methods of the present invention, unless otherwise understood from the context. In other words, within this application, embodiments have been described and depicted in a way that enables a clear and concise application to be written and drawn, but it is intended and will be appreciated that embodiments may be variously combined or separated without parting from the present teachings and invention(s). For example, it will be appreciated that all features described and depicted herein can be applicable to all aspects of the invention(s) described and depicted herein.

[0310] It should be understood that the expression “at least one of” includes individually each of the recited objects after the expression and the various combinations of two or more of the recited objects unless otherwise understood from the context and use. The expression “and/or” in connection with three or more recited objects should be understood to have the same meaning unless otherwise understood from the context.

[0311] The use of the term “include,” “includes,” “including,” “have,” “has,” “having,” “contain,” “contains,” or “containing,” including grammatical equivalents thereof, should be understood generally as open-ended and non-limiting, for example, not excluding additional unrecited elements or steps, unless otherwise specifically stated or understood from the context.

[0312] Where the use of the term “about” is before a quantitative value, the present invention also includes the specific quantitative value itself, unless specifically stated otherwise. As used herein, the term “about” refers to a ±10% variation from the nominal value unless otherwise indicated or inferred.

[0313] It should be understood that the order of steps or order for performing certain actions is immaterial so long as the present invention remain operable. Moreover, two or more steps or actions may be conducted simultaneously.

[0314] The use of any and all examples, or exemplary language herein, for example, “such as” or “including,” is intended merely to illustrate better the present invention and does not pose a limitation on the scope of the invention unless claimed. No language in the specification should be construed as indicating any non-claimed element as essential to the practice of the present invention.

### EXAMPLES

[0315] The following Examples are merely illustrative and are not intended to limit the scope or content of the invention in any way.

### Example 1

[0316] This example describes the construction of recombinant human sialidases (Neu1, Neu2, and Neu3).

[0317] The human sialidases Neu1, Neu2, Neu3 (isoform 1), and Neu4 (isoform 1) were expressed as secreted proteins with a 10×His tag. To express Neu1 as a secreted protein, the native N terminal signal peptide (MTGERPSTALPDRRWGPRILGFWGGCRVWVFAAIFLLLSLAASWSKA; SEQ ID NO: 27) was replaced by MDMRVPAQLLGLLLLWLPGARC (SEQ ID NO: 28), and the C terminal lysosomal signal motif (YGTL; SEQ ID NO: 29) was removed. To express Neu2, Neu3, and Neu4 as secreted proteins, the N terminal signal peptide MDMRVPAQLLGLLLLWLPGARC (SEQ ID NO: 28) was added to each.

[0318] Sialidases were expressed in a 200 mL transfection of HEK293F human cells in 24-well plates using the pCEP4 mammalian expression vector with an N-terminal 6×His tag. Sialidases were purified using Ni-NTA columns, quantified with a UV-Vis spectrophotometer (NanoDrop), and examined by SDS-PAGE as shown in FIG. 1. Neu1 expressed well, with a yield of ˜3 μg/ml, and was present primarily in a monomeric form. Neu2 and Neu3 expression each gave yields of ˜0.15 μg/mL and each were present primarily in a dimeric form. Neu4 had no detectable expression yield as measured by NanoDrop. Bacterial sialidase from Salmonella typhimurium (St-sialidase; SEQ ID NO: 30), which was used as a positive control for expression, gave a comparable yield to Neu1, and was present primarily in a monomeric form.

[0319] The activity of the recombinantly expressed sialidases was assayed by measuring the release of sialic acid from the fluorogenic substrate 4-methylumbelliferyl-N-acetylneuraminic acid (4MU-NeuAc). As shown in FIG. 2, Neu1 has no detectable activity above a no-enzyme control, which is consistent with previous reports indicating that Neu1 is inactive unless it is in complex with beta-galactosidase and protective protein/cathepsin A (PPCA). Neu2 and Neu3 were active. An enzyme kinetics assay was performed with Neu2 and Neu3. A fixed concentration of enzyme at 1 nM was incubated with fluorogenic substrate 4MU-NeuAc at concentrations ranging from 4000 μM to 7.8 μM. Assays were conducted at both acidic (pH 5.6) and neutral (pH 7) conditions. As shown in FIG. 3, both Neu2 and Neu3 were active at acidic and neutral conditions and showed enzyme kinetics that were comparable to those previously reported.

[0320] Most of the recombinantly expressed sialidases ran as aggregates or dimers on a non-reducing SDS-PAGE gel. Subsequent treatment with the reducing agent dithiothreitol (DTT) resulted in a monomeric form of the enzyme that ran at 42 kDa on a reducing SDS-PAGE gel (FIG. 1).

### Example 2

[0321] This example describes the construction of recombinant human sialidases with mutations that increase expression and/or activity of the sialidase.

### A. Rational Design

[0322] Structural and sequence analysis identified residues A93 and P62 of Neu2 as candidates for substitutions to increase solubility and/or expression. In particular, a comparison of homologous sialidase sequences showed a preference for D or E amino acid residues at positions corresponding to position 93 of Neu2, and a preference for G amino acid residues at positions corresponding to position 62 of Neu2.

[0323] The beta-propeller family of proteins are usually stabilized by extensive hydrogen bonding interactions at the N- and C-termini of the protein. A structural analysis revealed that Neu2, which is a member of the beta-propeller family, appears to lack these stabilizing interactions. In contrast, sialidases from Salmonella typhimurium and Micromonospora viridifaciens (the bacterial sialidase most homologous to human Neu2) have extensive hydrogen bonding interactions at their N- and C-termini. Accordingly, residues K9, V363, and L365 of Neu2 were mutated to promote hydrogen bonding between the N- and C-termini of Neu2.

### B. Phage Display

[0324] Neu2 was expressed in a phage display system allowing for screening of Neu2 variants for both expression level and resistance to heat denaturation. Neu2 with V6Y and I187K substitutions was used as a template for library preparation. Designed phage display libraries 1, 2, and 3 are depicted in TABLES 11-13, respectively. Each library included all of the possible combinations of the mutations depicted. A fourth library included random mutations generated by error prone PCR.

TABLE 11
Phage Library 1

| Wild-Type | | | |
|---|---|---|---|
| Neu2 Amino | | Substituting | Codon |
| Acid(s) | Design | Amino Acids | Usage |
| 184-188 | Adjust length of 5 wild-type | S, N, R, K, T, G, | RVM |
| LHPIQ | residues from 2 to 5 and | D, E, A | |
| | substitute each residue with | | |
| | one of 9 polar amino acids | | |
| P190, I191 | Substitute with one of 5 non- | F, I, L, M, V | NTK |
| | polar amino acids | | |
| C219 | Substitute with one of 12 polar | R, N, D, C, G, | NDT |
| | or nonpolar amino acids | H, I, L, F, S, Y, | |
| | | V | |
| L217 | Substitute with one of 12 polar | R, N, D, C, G, | NDT |
| | or nonpolar amino acids | H, I, L, F, S, Y, | |
| | | V | |
| T216 and L217 | Insert one of 12 polar or | S, T, Y, L, F, A, | NHT |
| | nonpolar amino acids between | P, V, I, N, D, H | |
| | the wild-type amino acids | | |
| G271 | Substitute with one of 9 polar | S, N, R, K, T, G, | RVM |
| | amino acids | D, E, A | |
| C272 | Substitute with one of 9 polar | S, N, R, K, T, G, | RVM |
| | amino acids | D, E, A | |

TABLE 12
Phage Library 2

| Wild-Type | | | |
|---|---|---|---|
| Neu2 Amino | | Substituting | Codon |
| Acid(s) | Design | Amino Acids | Usage |
| 156-165 | Substitute with one of 12 | R, N, D, C, G, H, | NDT |
| TFAVGPGHCL | hydrophobic or polar amino | I, L, F, S, Y, V | |
| | acids | | |
| V176 | Substitute with one of 12 | R, N, D, C, G, H, | NDT |
| | hydrophobic or polar amino | I, L, F, S, Y, V | |
| | acids | | |
| P177 | Substitute with one of 12 | S, T, Y, L, F, A, | NHT |
| | hydrophobic or polar amino | P, V, I, N, D, H | |
| | acids | | |
| A178 | Substitute with one of 12 | S, T, Y, L, F, A, | NHT |
| | hydrophobic or polar amino | P, V, I, N, D, H | |
| | acids | | |
| A194 | Substitute with one of 12 | S, T, Y, L, F, A, | NHT |
| | hydrophobic or polar amino | P, V, I, N, D, H | |
| | acids | | |

TABLE 13
Phage Library 3

| Wild-Type Neu2 | | Substituting | Codon |
|---|---|---|---|
| Amino Acid(s) | Design | Amino Acids | Usage |
| F13 | Substitute with one of 9 polar | S, N, R, K, T, G, | RMV |
| | amino acids chain AAs | D, E, A | |
| L4 | Substitute with one of 12 | S, T, Y, L, F, A, | NHT |
| | hydrophobic or polar amino | P, V, I, N, D, H | |
| | acids | | |
| L7, V12 | Substitute with one of 6 polar | F, Y, S, I, T, N | WHT |
| | or aromatic amino acids | | |
| I22, A24 | Substitute with one of 9 polar | S, N, R, K, T, G, | RMV |
| | amino acids | D, E, A | |
| V325, L326, and | Substitute with one of 6 polar | F, Y, S, I, T, N | WHT |
| L327 | or aromatic amino acids | | |
| L365 | Substitute with one of 6 polar | F, Y, S, I, T, N | WHT |
| | or aromatic amino acids | | |
| P89 | Substitute with one of 5 non- | F, I, L, M, V | NTK |
| | polar amino acids | | |
| L34, A36, and | Substitute with one of 12 | S, T, Y, L, F, A, | NHT |
| V363 | hydrophobic or polar amino | P, V, I, N, D, H | |
| | acids | | |

[0325] The codon usage columns in TABLES 11-13 represent degenerate codon codes used in the design of the library, where the first, second, and third positions of a given codon encoding an amino acid are as shown in TABLE 14 and as described in Mena et al. (2005) PROTEIN ENG DES SEL. 18(12):559-61.

TABLE 14

| Degenerate Codon Code | Mixed bases |
|---|---|
| R | A, G |
| Y | C, T/U |
| M | A, C |
| K | G, T/U |
| S | G, C |
| W | A, T |
| H | A, C, T/U |
| B | G, C, T (or |
| | U) |
| V | A, C, G |
| D | A, G, T/U |
| N | A, C, G, T/U |

[0326] The phage display libraries were screened for binding to a conformation-specific antibody and/or a sialic acid biotinylated probe after heating to enrich for thermal stability and expression. The sialic acid biotinylated probe and its synthesis is depicted in FIG. 4. An exemplary phage display screening procedure is depicted in FIG. 5. Briefly, phage libraries expressing the desired Neu2 variants were generated. Phage were screened for binding to immobilized anti-Neu2 antibody and/or sialic acid biotinylated probe. Following washing to remove unbound phage, bound phage were eluted from the antibody or probe and analyzed as appropriate.

### C. Yeast Display

[0327] Neu2 was also expressed in a yeast display system allowing for screening of Neu2 variants for both expression level and resistance to heat denaturation. Neu2 with V6Y and I187K substitutions was used as a template for library preparation. Designed yeast display libraries 1a, 1b, 1c, 1d, 2a, 2b, 2c, 3a, 3b, and 3c are depicted in TABLES 15-24, respectively. Each library included all of the possible combinations of the mutations depicted. Five additional sublibraries were generated by error prone PCR, at an approximate average rate of 1, 2, 3, 4, and 5 substitutions per enzyme.

TABLE 15
Yeast Library 1a

| Wild-Type Neu2 | | Codon |
|---|---|---|
| Amino Acid(s) | Substituting Amino Acids | Usage |
| L184 | All | NNK |
| H185 | All | NNK |
| P186 | None (Wild-type) | |
| K187 | None (Wild-type) | |
| Q188 | None (Wild-type) | |
| P190 | A, D, G, H, I, L, N, P, R, S, T, V | VNT |
| I191 | A, D, F, H, I, L, N, P, S, T, V, Y | NHT |
| C219 | None (Wild-type) | |
| G271 | All | NNK |
| C272 | All | NNK |

Total Diversity: 2.30E+07

TABLE 16
Yeast Library 1b

| Wild-Type Neu2 | | Codon |
|---|---|---|
| Amino Acid(s) | Substituting Amino Acids | Usage |
| L184 | A, D, F, H, I, L, N, P, S, T, V, Y | NHT |
| H185 | All | NNK |
| P186 | A, D, F, H, I, L, N, P, S, T, V, Y | NHT |
| K187 | None (Wild-type) | |
| Q188 | None (Wild-type) | |
| P190 | A, D, G, H, I, L, N, P, R, S, T, V | VNT |
| I191 | A, D, F, H, I, L, N, P, S, T, V, Y | NHT |
| C219 | None (Wild-type) | |
| G271 | A, D, E, G, K, N, R, S, T | RVM |
| C272 | A, C, D, G, H, N, P, R, S, T | NVT |

Total Diversity: 4.11E+07

TABLE 17
Yeast Library 1c

| Wild-Type Neu2 | | Codon |
|---|---|---|
| Amino Acid(s) | Substituting Amino Acids | Usage |
| L184 | A, D, F, H, I, L, N, P, S, T, V, Y | NHT |
| H185 | A, D, E, G, K, N, R, S, T | RVM |
| P186 | A, D, F, H, I, L, N, P, S, T, V, Y | NHT |
| K187 | A, D, E, G, K, N, R, S, T | RVM |
| Q188 | None (Wild-type) | |
| P190 | F, L, I, V | NTT |
| I191 | A, D, F, H, I, L, N, P, S, T, V, Y | NHT |
| C219 | None (Wild-type) | |
| G271 | A, D, E, G, K, N, R, S, T | RVM |
| C272 | A, D, F, H, L, P, S, V, Y | BHT |

Total Diversity: 4.53E+07

TABLE 18
Yeast Library 1d

| Wild-Type Neu2 | | Codon |
|---|---|---|
| Amino Acid(s) | Substituting Amino Acids | Usage |
| L184 | A, D, F, H, L, P, S, V, Y | BHT |
| H185 | A, D, E, G, K, N, R, S, T | RVM |
| P186 | A, D, F, H, L, P, S, V, Y | BHT |
| K187 | A, D, E, G, K, N, R, S, T | RVM |
| Q188 | A, D, F, H, L, P, S, V, Y | BHT |
| P190 | None (Wild-type) | |
| I191 | A, D, E, G, K, N, R, S, T | RVM |
| C219 | None (Wild-type) | |
| G271 | A, D, E, G, K, N, R, S, T | RVM |
| C272 | A, D, F, H, L, P, S, V, Y | BHT |

Total Diversity: 4.30E+07

TABLE 19
Yeast Library 2a

| Wild-Type Neu2 | | Codon |
|---|---|---|
| Amino Acid(s) | Substituting Amino Acids | Usage |
| T156 | R, N, D, C, G, H, I, L, F, S, Y, V | NDT |
| F157 | None (Wild-type) | |
| A158 | R, N, D, C, G, H, I, L, F, S, Y, V | NDT |
| V159 | None (Wild-type) | |
| G160 | R, N, D, C, G, H, I, L, F, S, Y, V | NDT |
| P161 | None (Wild-type) | |
| G162 | R, N, D, C, G, H, I, L, F, S, Y, V | NDT |
| H163 | None (Wild-type) | |
| C164 | R, N, D, C, G, H, I, L, F, S, Y, V | NDT |
| L165 | None (Wild-type) | |
| V176 | L, V, P, A, H, D | SHT |
| P177 | L, V, P, A, H, D | SHT |
| A178 | L, V, P, A, H, D | SHT |
| A194 | L, V, P, A, H, D | SHT |

Total Diversity: 3.22E+08

TABLE 20
Yeast Library 2b

| Wild-Type Neu2 | | Codon |
|---|---|---|
| Amino Acid(s) | Substituting Amino Acids | Usage |
| T156 | None (Wild-type) | |
| F157 | R, N, D, C, G, H, I, L, F, S, Y, V | NDT |
| A158 | None (Wild-type) | |
| V159 | R, N, D, C, G, H, I, L, F, S, Y, V | NDT |
| G160 | None (Wild-type) | |
| P161 | R, N, D, C, G, H, I, L, F, S, Y, V | NDT |
| G162 | None (Wild-type) | |
| H163 | R, N, D, C, G, H, I, L, F, S, Y, V | NDT |
| C164 | None (Wild-type) | |
| L165 | R, N, D, C, G, H, I, L, F, S, Y, V | NDT |
| V176 | L, V, P, A, H, D | SHT |
| P177 | L, V, P, A, H, D | SHT |
| A178 | L, V, P, A, H, D | SHT |
| A194 | L, V, P, A, H, D | SHT |

Total Diversity: 3.22E+08

TABLE 21
Yeast Library 2c

| Wild-Type Neu2 | | Codon |
|---|---|---|
| Amino Acid(s) | Substituting Amino Acids | Usage |
| T156 | A, D, G, H, N, P, R, S, T | VVC |
| F157 | A, D, F, H, L, P, S, V, Y | BHT |
| A158 | A, D, G, H, N, P, R, S, T | VVC |
| V159 | A, D, F, H, L, P, S, V, Y | BHT |
| G160 | A, D, G, H, N, P, R, S, T | VVC |
| P161 | A, D, F, H, L, P, S, V, Y | BHT |
| G162 | A, D, G, H, N, P, R, S, T | VVC |
| H163 | A, D, F, H, L, P, S, V, Y | BHT |
| C164 | A, D, G, H, N, P, R, S, T | VVC |
| L165 | A, D, F, H, L, P, S, V, Y | BHT |
| V176 | None (Wild-type) | |
| P177 | None (Wild-type) | |
| A178 | None (Wild-type) | |
| A194 | None (Wild-type) | |

Total Diversity: 3.49E+09

TABLE 22
Yeast Library 3a

| Wild-Type Neu2 | | Codon |
|---|---|---|
| Amino Acid(s) | Substituting Amino Acids | Usage |
| L4 | S, T, Y, L, F, A, P, V, I, N, D, H | NHT |
| L7 | F, Y, S, I, T, N | WHT |
| V12 | None (Wild-type) | |
| F13 | None (Wild-type) | |
| I22 | S, N, R, K, T, G, D, E, A | RMV |
| A24 | S, N, R, K, T, G, D, E, A | RMV |
| L34 | None (Wild-type) | |
| A36 | None (Wild-type) | |
| H64 | F, Y, S, I, T, N | WHT |
| P89 | F, I, L, V | NTT |
| C164 | None (Wild-type) | |
| V325 | F, Y, S, I, T, N | WHT |
| L326 | F, Y, S, I, T, N | WHT |
| L327 | F, Y, S, I, T, N | WHT |
| C332 | None (Wild-type) | |
| V363 | S, T, Y, L, F, A, P, V, I, N, D, H | NHT |

Total Diversity: 3.63E+08

TABLE 23
Yeast Library 3b

| Wild-Type Neu2 | | Codon |
|---|---|---|
| Amino Acid(s) | Substituting Amino Acids | Usage |
| L4 | None (Wild-type) | |
| L7 | F, Y, S, I, T, N | WHT |
| V12 | S, T, Y, L, F, A, P, V, I, N, D, H | NHT |
| F13 | S, N, R, K, T, G, D, E, A | RMV |
| I22 | S, N, R, K, T, G, D, E, A | RMV |
| A24 | S, N, R, K, T, G, D, E, A | RMV |
| L34 | S, T, Y, L, F, A, P, V, I, N, D, H | NHT |
| A36 | S, T, Y, L, F, A, P, V, I, N, D, H | NHT |
| H64 | None (Wild-type) | |
| P89 | None (Wild-type) | |
| C164 | A, G, S, T | RST |
| V325 | None (Wild-type) | |
| L326 | None (Wild-type) | |
| L327 | None (Wild-type) | |
| C332 | A, D, G, H, N, P, R, S, T | VVC |
| V363 | None (Wild-type) | |

Total Diversity: 2.72E+08

TABLE 24
Yeast Library 3c

| Wild-Type Neu2 | | Codon |
|---|---|---|
| Amino Acid(s) | Substituting Amino Acids | Usage |
| L4 | None (Wild-type) | |
| L7 | None (Wild-type) | |
| V12 | None (Wild-type) | |
| F13 | None (Wild-type) | |
| I22 | S, T, Y, L, F, A, P, V, I, N, D, H | NHT |
| A24 | S, T, Y, L, F, A, P, V, I, N, D, H | NHT |
| L34 | None (Wild-type) | |
| A36 | None (Wild-type) | |
| H64 | F, Y, S, I, T, N | WHT |
| P89 | S, T, Y, L, F, A, P, V, I, N, D, H | NHT |
| C164 | A, G, S, T | RST |
| V325 | A, D, F, H, L, P, S, V, Y | BHT |
| L326 | A, D, F, H, L, P, S, V, Y | BHT |
| L327 | A, D, F, H, L, P, S, V, Y | BHT |
| C332 | A, D, G, H, N, P, R, S, T | VVC |
| V363 | None (Wild-type) | |

Total Diversity: 2.72E+08

[0328] The codon usage columns in TABLES 15-24 represent degenerate codon codes used in the design of the library, where the first, second, and third positions of a given codon encoding an amino acid are as shown herein above in TABLE 14 and as described in Mena et al. (2005) PROTEIN ENG DES SEL. 18(12):559-61.

[0329] The yeast display libraries were screened for binding to a conformation-specific antibody and/or a sialic acid biotinylated probe after heating to enrich for thermal stability and expression. An exemplary yeast display screening procedure is depicted in FIG. 6. Briefly, a plasmid library encoding for the desired Neu2 variants, and yeast cells expressing the desired Neu2 variants on the surface, were generated. Yeast cells were heat shocked and then screened for binding to anti-Neu2 antibody and/or sialic acid biotinylated probe on magnetic beads. The magnetic beads were isolated to remove unbound cells, and bound cells were further analyzed for Neu2 affinity, activity, and stability as appropriate.

### D. Results

[0330] Mutant sialidases including mutations identified using the rational design, phage display, and yeast display approaches described in this Example were expressed as secreted proteins with a C-terminal human Fc tag in Expi293F cells using the pCEP4 mammalian expression vector. Expression was assayed using a ForteBio Octet with anti-human Fc sensors and Western blot and enzymatic activity was assayed using the fluorogenic substrate 4MU-NeuAc as described above.

[0331] Expression and activity levels for the mutant sialidases are shown in TABLE 25. In TABLE 25, enzymatic activity is indicated as “+++,” which denotes activity >2 fold higher than wild-type Neu2, “++,” which denotes activity comparable to wild-type Neu2, “+,” which denotes activity lower than wild-type Neu2, or “−,” which denotes no detectable activity, and expression is indicated as “++++,” which denotes expression >15 fold higher than wildtype-Neu2, “+++,” which denotes expression >6 fold higher than wild-type Neu2, “++,” which denotes expression 2-5 fold higher than wild-type Neu2, “+,” which denotes expression comparable to wild-type Neu2, or “−,” which denotes no detectable expression.

TABLE 25

| Identifier | Mutation(s) | Activity | Expression |
|---|---|---|---|
| Neu2-M104 | M1D, V6Y, P62G, I187K, C332A | + | ++++ |
| Neu2-M105 | M1D, V6Y, K9D, I187K, C332A, | + | +++ |
| | V363R, L365I | | |
| Neu2-M106 | M1D, V6Y, P62G, A93E, I187K, | ++ | ++++ |
| | C332A | | |
| Neu2-M107 | M1D, V6Y, K9D, I187K, C332A, | + | ++++ |
| | V363R, L365K | | |
| Neu2-M108 | M1D, V6Y, K9D, I187K, C332A, | + | ++++ |
| | V363R, L365S | | |
| Neu2-M109 | M1D, V6Y, K9D, I187K, C332A, | + | ++++ |
| | V363R, L365Q | | |
| Neu2-M110 | M1D, V6Y, K9D, I187K, C332A, | + | +++ |
| | V363R, L365H | | |
| Neu2-M111 | M1D, V6Y, A93K, I187K, C332A | ++ | ++ |
| Neu2-M112 | M1D, V6Y, A93E, I187K, C332A | ++ | ++ |
| Neu2-M113 | V6Y, I22N, C125Y, I187K, | − | +++ |
| | S301C, E319D | | |
| Neu2-M114 | V6Y, P62T, C125F, I187K, | − | +++ |
| | A222D | | |
| Neu2-M115 | V6Y, I187K, W292R | + | +++ |
| Neu2-M116 | V6Y, G107D, I187K | + | +++ |
| Neu2-M117 | C125L | + | + |
| Neu2-M118 | V6Y, C125L | + | ++ |
| Neu2-M119 | C125L, I187K | ++ | ++ |
| Neu2-M120 | V6Y, C125L, I187K | + | +++ |
| Neu2-M121 | M1D, V6Y, K45A, I187K, C332A | ++ | ++ |
| Neu2-M122 | M1D, V6Y, Q270A, I187K, | ++ | +++ |
| | C332A | | |
| Neu2-M123 | M1D, V6Y, K44R, K45R, I187K, | + | ++ |
| | C332A | | |
| Neu2-M124 | M1D, V6Y, Q112R, I187K, | + | ++ |
| | C332A | | |
| Neu2-M125 | M1D, V6Y, Q270F, I187K, | + | ++ |
| | C332A | | |
| Neu2-M126 | M1D, V6Y, I187K, S301R, | ++ | +++ |
| | W302K, C332A | | |
| Neu2-M127 | M1D, V6Y, K44E, K45E, I187K, | ++ | + |
| | C332A | | |
| Neu2-M128 | M1D, V6Y, I187K, L217V, | + | ++ |
| | C332A | | |
| Neu2-M129 | M1D, V6Y, I187K, L217A, | + | ++ |
| | C332A | | |
| Neu2-M130 | M1D, V6Y, I187K, C332A, | − | +++ |
| | Y359A | | |
| Neu2-M131 | M1D, V6Y, I187K, C332A, | − | +++ |
| | Y359S | | |
| Neu2-M132 | M1D, V6Y, K44E, K45E, I187K, | ++ | ++ |
| | S301R, W302K, C332A | | |
| Neu2-M133 | M1D, V6Y, Q112R, I187K, | ++ | +++ |
| | S301R, W302K, C332A | | |
| Neu2-M134 | M1D, V6Y, I187K, Q270A, | ++ | +++ |
| | S301R, W302K, C332A | | |
| Neu2-M135 | M1D, V6Y, K44E, K45E, Q112R, | + | + |
| | I187K, C332A | | |
| Neu2-M136 | M1D, V6Y, K44E, K45E, I187K, | ++ | ++ |
| | Q270A, C332A | | |
| Neu2-M137 | M1D, V6Y, K45A, I187K, | ++ | +++ |
| | Q270A, C332A | | |
| Neu2-M138 | M1D, V6Y, I187K, Q270H, | ++ | +++ |
| | C332A | | |
| Neu2-M139 | M1D, V6Y, I187K, Q270P, | + | +++ |
| | C332A | | |
| Neu2-M140 | M1D, V6Y, Q112K, I187K, | ++ | ++ |
| | C332A | | |
| Neu2-M141 | M1D, V6Y, P62S, I187K, Q270A, | + | +++ |
| | S301R, W302K, C332A | | |
| Neu2-M142 | M1D, V6Y, P62T, I187K, Q270A, | + | +++ |
| | S301R, W302K, C332A | | |
| Neu2-M143 | M1D, V6Y, P62N, I187K, Q270A, | + | +++ |
| | S301R, W302K, C332A | | |
| Neu2-M144 | V6Y, P62H, I187K | + | +++ |
| Neu2-M145 | V6Y, Q108H, I187K | + | ++ |
| Neu2-M146 | M1D, V6Y, P62H, I187K, C332A | ++ | +++ |
| Neu2-M147 | M1D, V6Y, P62G, I187K, C332A | ++ | ++ |
| Neu2-M148 | V6Y, P62G, I187K | + | ++ |
| Neu2-M149 | M1D, V6Y, P62H, I187K | ++ | ++ |
| Neu2-M150 | M1D, V6Y, Q108H, I187K | ++ | ++ |
| Neu2-M151 | M1D, V6Y, P62F, I187K, C332A | + | − |
| Neu2-M152 | M1D, V6Y, P62I, I187K, C332A | + | − |
| Neu2-M153 | M1D, V6Y, P62N, I187K, C332A | ++ | +++ |
| Neu2-M154 | M1D, V6Y, P62D, I187K, C332A | ++ | + |
| Neu2-M155 | M1D, V6Y, P62E, I187K, C332A | ++ | +++ |
| Neu2-M156 | V6Y, C164G, I187K, T249A | + | + |
| Neu2-M157 | V6Y, C164G, I187K | + | + |
| Neu2-M158 | V6Y, Q126L, I187K D251G | + | ++ |
| Neu2-M159 | V6Y, L54M, Q69H, R78K, | + | + |
| | A171G, I187K | | |
| Neu2-M160 | V6Y, P62T, I187K | + | ++ |
| Neu2-M161 | V6Y, A150V, I187K | + | ++ |
| Neu2-M162 | P5H, V6Y, P62S, I187K | + | ++ |
| Neu2-M163 | V6Y, C164G, I187K | + | + |

[0332] To confirm these results, Neu2-M106 (with amino acid sequence SEQ ID NO: 48, encoded by nucleotide sequence SEQ ID NO: 89) was expressed and purified with a protein A column. FIG. 7A is an image of an SDS-PAGE gel showing recombinant wildtype human Neu2 and Neu2 variant M106 (each with a C-terminal human Fc tag) under non-reducing and reducing conditions. FIG. 7B is an SEC-HPLC trace for recombinant wildtype human Neu2 and Neu2 variant M106 (each with a C-terminal human Fc tag). While Neu2-Fc had a yield of 0.3 mg/liter following protein-A purification, and monomer content of 7% as determined by SEC, Neu2-M106 had a yield of 20 mg/liter, and a monomer content of 85%.

[0333] The enzyme kinetics of Neu2-M106 were assayed by measuring the release of sialic acid from the fluorogenic substrate 4-methylumbelliferyl-N-acetylneuraminic acid (4MU-NeuAc) as described above. A fixed concentration of enzyme at 2 μg/well was incubated with fluorogenic substrate 4MU-NeuAc at concentrations ranging from 4 mM to 0.03 μM. FIG. 8 depicts the enzyme activity of Neu2 variant M106. Enzymatic activity of Neu2-M106 was comparable to wildtype Neu2, with a K_{M} determined to be 230 μM.

[0334] Together, these results show that the mutations identified by rational design, phage display, and/or yeast display approaches described herein can increase stability and/or expression of a sialidase.

### Example 3

[0335] This Example describes the construction and expression of antibody-sialidase genetic fusion proteins, and antibody sialidase conjugates (ASCs) containing the fusion proteins, with mutated human sialidases.

[0336] The architecture for five types of exemplary ASCs is depicted in FIG. 11. The first type of ASC, referred to as “Raptor,” includes an antibody (with two heavy chains and two light chains) with a sialidase fused at the C-terminus of each heavy chain of the antibody (FIG. 11A). The second type of ASC, referred to as “Janus,” contains one antibody arm (with one heavy chain and one light chain), and one sialidase-Fc fusion with a sialidase fused at the N-terminus of one arm of the Fc. Each Fc domain polypeptide in the Janus ASC contains either the “knob” (T366Y) or “hole” (Y407T) mutation for heterodimerization (residue numbers according to EU numbering, Kabat, E. A., et al. (1991) supra) (FIG. 11B). The third type of ASC, referred to as “Lobster,” contains two Fc domain polypeptides each with a sialidase fused at the N-terminus of the Fc and a scFv fused at the C-terminus of the Fc (FIG. 11C). The fourth type of ASC, referred to as “Bunk,” contains one antibody arm (with one heavy chain and one light chain) with an scFv fused at the C-terminus of one arm of the Fc and one sialidase-Fc fusion with a sialidase fused at the N-terminus of the other arm of the Fc. Each Fc domain polypeptide in the Bunk ASC contains either the “knob” (T366Y) or “hole” (Y407T) mutation for heterodimerization (residue numbers according to EU numbering, Kabat, E. A., et al. (1991) supra) (FIG. 11D). The fifth type of ASC, referred to as “Lobster-Fab,” contains two Fc domain polypeptides each with (i) a sialidase fused at the N-terminus of the Fc and (ii) a Fab fused at the C-terminus of the Fc (FIG. 11E).

[0337] Janus ASCs including Neu2 variants described in Example 2 and trastuzumab were made and tested for activity and expression. Expression was assayed using a ForteBio Octet with anti-human Fc sensors and Western blot and enzymatic activity was assayed using the fluorogenic substrate 4MU-NeuAc as described above. Expression and activity levels for the Janus ASCs are shown in TABLE 26. In TABLE 26, enzymatic activity is indicated as “+++,” which denotes activity >2 fold higher than wild-type Neu2, “++,” which denotes activity comparable to wild-type Neu2, “+,” which denotes activity lower than wild-type Neu2, or “−,” which denotes no detectable activity, and expression is indicated as “++++,” which denotes expression >15 fold higher than wildtype-Neu2, “+++,” which denotes expression >6 fold higher than wild-type Neu2, “++,” which denotes expression 2-5 fold higher than wild-type Neu2, “+,” which denotes expression comparable to wild-type Neu2, or “−,” which denotes no detectable expression.

TABLE 26

| Neu2 | | | |
|---|---|---|---|
| Variant | Mutation(s) | Activity | Expression |
| Neu2-M146 | M1D, V6Y, P62H, I187K, C332A | +++ | +++ |
| Neu2-M147 | M1D, V6Y, P62G, I187K, C332A | ++ | ++ |
| Neu2-M148 | V6Y, P62G, I187K | ++ | +++ |
| Neu2-M149 | M1D, V6Y, P62H, I187K | + | +++ |
| Neu2-M150 | M1D, V6Y, Q108H, I187K | ++ | ++ |
| Neu2-M151 | M1D, V6Y, P62F, I187K, C332A | ++ | +++ |
| Neu2-M152 | M1D, V6Y, P62I, I187K, C332A | ++ | +++ |
| Neu2-M153 | M1D, V6Y, P62N, I187K, C332A | ++ | +++ |
| Neu2-M154 | M1D, V6Y, P62D, I187K, C332A | ++ | ++ |
| Neu2-M155 | M1D, V6Y, P62E, I187K, C332A | ++ | + |
| Neu2-M156 | V6Y, C164G, I187K, T249A | + | + |
| Neu2-M157 | V6Y, C164G, I187K | + | + |
| Neu2-M158 | V6Y, Q126L, I187K D251G | ++ | ++ |
| Neu2-M159 | V6Y, L54M, Q69H, R78K, | + | + |
| | A171G, I187K | | |
| Neu2-M160 | V6Y, P62T, I187K | ++ | ++ |
| Neu2-M161 | V6Y, A150V, I187K | + | ++ |
| Neu2-M162 | P5H, V6Y, P62S, I187K | ++ | ++ |
| Neu2-M163 | V6Y, C164G, I187K | + | + |

[0338] Additional Janus ASCs including Neu2 variants described in Example 2 and trastuzumab were made and tested for activity and expression. Janus ASCs were expressed in Expi293F cells in 500 mL cultures and purified using protein A and ion exchange chromatography. Expression was assayed using a ForteBio Octet with anti-human Fc sensors and Western blot and enzymatic activity was assayed using the fluorogenic substrate 4MU-NeuAc as described above. Expression and activity levels for the Janus ASCs are shown in TABLE 27. In TABLE 27, enzymatic activity is indicated as “+++,” which denotes activity >2 fold higher than wild-type Neu2, “++,” which denotes activity comparable to wild-type Neu2, “+,” which denotes activity lower than wild-type Neu2, or “−,” which denotes no detectable activity, and expression is indicated as “++++,” which denotes expression >15 fold higher than wildtype-Neu2, “+++,” which denotes expression >6 fold higher than wild-type Neu2, “++,” which denotes expression 2-5 fold higher than wild-type Neu2, “+,” which denotes expression comparable to wild-type Neu2, or “−,” which denotes no detectable expression.

TABLE 27

| Neu2 | | | |
|---|---|---|---|
| Variant | Mutation(s) | Activity | Expression |
| Neu2-M106 | M1D, V6Y, P62G, A93E, I187K, | ++ | ++++ |
| | C332A | | |
| Neu2-M134 | M1D, V6Y, I187K, Q270A, | +++ | ++++ |
| | S301R, W302K, C332A | | |
| Neu2-M141 | M1D, V6Y, P62S, I187K, Q270A, | ++ | ++++ |
| | S301R, W302K, C332A | | |
| Neu2-M142 | M1D, V6Y, P62T, I187K, Q270A, | ++ | ++++ |
| | S301R, W302K, C332A | | |
| Neu2-M143 | M1D, V6Y, P62N, I187K, Q270A, | ++ | ++++ |
| | S301R, W302K, C332A | | |
| Neu2-M153 | M1D, V6Y, P62N, I187K, C332A | ++ | ++++ |

### Example 4

[0339] This example describes the construction of recombinant human sialidases with mutations that increase expression and/or activity of the sialidase.

[0340] Unless indicated otherwise, mutant sialidases in this Example were expressed as secreted proteins with a C-terminal human Fc tag in Expi293F cells using the pCEP4 mammalian expression vector. Expression was assayed using a ForteBio Octet with anti-human Fc sensors and Western blot and enzymatic activity was assayed using the fluorogenic substrate 4MU-NeuAc as described above.

[0341] Mutant Neu2 sialidases were constructed including rationally designed substitutions at position Q126. Inspection of the Neu2 crystal structure revealed that mutation of Q126 may increase interactions with neighboring amino acid residues.

[0342] Additional mutant Neu2 sialidases were constructed including rationally designed substitution at position Q270. Inspection of the Neu2 crystal structure revealed that mutation of Q270 to certain amino acids may stabilize interactions with R237 and stabilize binding in the substrate pocket.

[0343] Additional mutant Neu2 sialidases were constructed including a substitution of an amino acid residue in a beta turn with a proline (for example D80P, R189P, and/or H239P substitutions). Substitution with a proline at these positions may, for example, stabilize the protein by influencing local protein folding.

[0344] Expression and activity levels for the resulting mutant sialidases are shown in TABLE 28. In TABLE 28, enzymatic activity is indicated as “++,” which denotes activity comparable to wild-type Neu2, “+,” which denotes activity lower than wild-type Neu2, or “−,” which denotes no detectable activity, and expression is indicated as “+++++”, which denotes expression >40 fold higher than wildtype-Neu2, “++++”, which denotes expression >15 fold higher than wildtype-Neu2, “+++,” which denotes expression >6 fold higher than wild-type Neu2, “++,” which denotes expression 2-5 fold higher than wild-type Neu2, “+,” which denotes expression comparable to wild-type Neu2, or “−,” which denotes no detectable expression.

TABLE 28

| Identifier | Mutation(s) | Activity | Expression |
|---|---|---|---|
| Neu2-M164 | M1D, V6Y, P62G, A93E, | ++ | ++++ |
| | Q126E, I187K, C332A | | |
| Neu2-M165 | M1D, V6Y, P62G, A93E, | ++ | ++++ |
| | Q126I, I187K, C332A | | |
| Neu2-M166 | M1D, V6Y, P62G, A93E, | + | +++++ |
| | Q126L, I187K, C332A | | |
| Neu2-M167 | M1D, V6Y, P62G, A93E, | + | +++++ |
| | Q126Y, I187K, C332A | | |
| Neu2-M168 | M1D, V6Y, P62G, A93E, | + | +++++ |
| | Q126F, I187K, C332A | | |
| Neu2-M169 | M1D, V6Y, P62G, A93E, | ++ | ++++ |
| | Q126H, I187K, C332A | | |
| Neu2-M170 | M1D, V6Y, P62G, A93E, | ++ | ++++ |
| | I187K, Q270S, C332A | | |
| Neu2-M171 | M1D, V6Y, P62G, A93E, | ++ | ++++ |
| | I187K, Q270T, C332A | | |
| Neu2-M172 | M1D, V6Y, P62G, A93E, | ++ | +++++ |
| | Q126Y, I187K, Q270T, | | |
| | C332A | | |
| Neu2-M173 | M1D, V6Y, P62G, A93E, | ++ | +++++ |
| | Q126Y, I187K, A242F, | | |
| | Q270T, C332A | | |
| Neu2-M174 | M1D, V6Y, P62G, D80P, | ++ | ++++ |
| | A93E, I187K, C332A | | |
| Neu2-M175 | M1D, V6Y, P62G, A93E, | ++ | +++ |
| | R170P, I187K, C332A | | |
| Neu2-M176 | M1D, V6Y, P62G, A93E, | ++ | ++++ |
| | I187K, Q188P, C332A | | |
| Neu2-M177 | M1D, V6Y, P62G, A93E, | ++ | ++++ |
| | I187K, R189P, C332A | | |
| Neu2-M178 | M1D, V6Y, P62G, A93E, | + | ++++ |
| | I187K, E225P, C332A | | |
| Neu2-M179 | M1D, V6Y, P62G, A93E, | ++ | ++++ |
| | I187K, H239P, C332A | | |
| Neu2-M180 | M1D, V6Y, P62G, A93E, | ++ | +++ |
| | I187K, E257P, C332A | | |

[0345] To confirm these results, Neu2-M173 (with amino acid sequence SEQ ID NO: 159, encoded by nucleotide sequence SEQ ID NO: 181) was expressed with a C-terminal human Fc tag and purified with a protein A and a ceramic hydroxyapatite (CHT) column. FIG. 22A is an image of an SDS-PAGE gel showing Neu2-M173-Fc (with a C-terminal human Fc tag) under non-reducing and reducing conditions. FIG. 22B is an SEC-HPLC trace for Neu2-M173-Fc (with a C-terminal human Fc tag). Neu2-M173-Fc had a yield of 120 mg/liter, and a monomer content of 90%.

[0346] The enzyme kinetics of Neu2-M173-Fc were assayed by measuring the release of sialic acid from the fluorogenic substrate 4-methylumbelliferyl-N-acetylneuraminic acid (4MU-NeuAc) as described above. A fixed concentration of enzyme at 2 μg/well was incubated with fluorogenic substrate 4MU-NeuAc at concentrations ranging from 4 mM to 0.03 μM. FIG. 23 depicts the enzyme activity of Neu2-M173-Fc. Enzymatic activity of Neu2-M173-Fc was comparable to wildtype Neu2, with a K_{M} determined to be 230 μM.

[0347] Additional mutant Neu2 sialidases were constructed including rationally designed substitutions at positions S301 and/or W302. Mutations of S301 and/or W302 may influence interactions with neighboring amino acid residues and/or substrate.

[0348] Expression and activity levels for the mutant sialidases are shown in TABLE 29. In TABLE 29, enzymatic activity is indicated as “++,” which denotes activity comparable to wild-type Neu2, “+,” which denotes activity lower than wild-type Neu2, or “−,” which denotes no detectable activity, and expression is indicated as “+++++”, which denotes expression >40 fold higher than wildtype-Neu2, “++++”, which denotes expression >15 fold higher than wildtype-Neu2, “+++,” which denotes expression >6 fold higher than wild-type Neu2, “++,” which denotes expression 2-5 fold higher than wild-type Neu2, “+,” which denotes expression comparable to wild-type Neu2, or “−,” which denotes no detectable expression.

TABLE 29

| Identifier | Mutation(s) | Activity | Expression |
|---|---|---|---|
| Neu2-M182 | M1D, V6Y, P62G, A93E, I187K, | ++ | ++++ |
| | S301A, C332A | | |
| Neu2-M183 | M1D, V6Y, P62G, A93E, I187K, | ++ | ++++ |
| | S301D, C332A | | |
| Neu2-M184 | M1D, V6Y, P62G, A93E, I187K, | ++ | +++ |
| | S301E, C332A | | |
| Neu2-M185 | M1D, V6Y, P62G, A93E, I187K, | + | ++++ |
| | S301F, C332A | | |
| Neu2-M186 | M1D, V6Y, P62G, A93E, I187K, | + | ++++ |
| | S301H, C332A | | |
| Neu2-M187 | M1D, V6Y, P62G, A93E, I187K, | ++ | +++++ |
| | S301K, C332A | | |
| Neu2-M188 | M1D, V6Y, P62G, A93E, I187K, | ++ | ++++ |
| | S301L, C332A | | |
| Neu2-M189 | M1D, V6Y, P62G, A93E, I187K, | ++ | ++++ |
| | S301M, C332A | | |
| Neu2-M190 | M1D, V6Y, P62G, A93E, I187K, | ++ | ++++ |
| | S301N, C332A | | |
| Neu2-M191 | M1D, V6Y, P62G, A93E, I187K, | ++ | ++++ |
| | S301P, C332A | | |
| Neu2-M192 | M1D, V6Y, P62G, A93E, I187K, | ++ | +++ |
| | S301Q, C332A | | |
| Neu2-M193 | M1D, V6Y, P62G, A93E, I187K, | ++ | +++++ |
| | S301R, C332A | | |
| Neu2-M194 | M1D, V6Y, P62G, A93E, I187K, | ++ | ++++ |
| | S301T, C332A | | |
| Neu2-M195 | M1D, V6Y, P62G, A93E, I187K, | ++ | ++++ |
| | S301V, C332A | | |
| Neu2-M196 | M1D, V6Y, P62G, A93E, I187K, | + | ++++ |
| | S301W, C332A | | |
| Neu2-M197 | M1D, V6Y, P62G, A93E, I187K, | ++ | ++++ |
| | S301Y, C332A | | |
| Neu2-M198 | M1D, V6Y, P62G, A93E, I187K, | + | ++++ |
| | W302A, C332A | | |
| Neu2-M199 | M1D, V6Y, P62G, A93E, I187K, | +++ | +++ |
| | W302D, C332A | | |
| Neu2-M200 | M1D, V6Y, P62G, A93E, I187K, | + | ++++ |
| | W302F, C332A | | |
| Neu2-M201 | M1D, V6Y, P62G, A93E, I187K, | ++ | ++++ |
| | W302G, C332A | | |
| Neu2-M202 | M1D, V6Y, P62G, A93E, I187K, | + | ++++ |
| | W302H, C332A | | |
| Neu2-M203 | M1D, V6Y, P62G, A93E, I187K, | + | ++++ |
| | W302I, C332A | | |
| Neu2-M204 | M1D, V6Y, P62G, A93E, I187K, | ++ | ++++ |
| | W302L, C332A | | |
| Neu2-M205 | M1D, V6Y, P62G, A93E, I187K, | + | ++ |
| | W302M, C332A | | |
| Neu2-M206 | M1D, V6Y, P62G, A93E, I187K, | + | ++++ |
| | W302N, C332A | | |
| Neu2-M207 | M1D, V6Y, P62G, A93E, I187K, | − | ++++ |
| | W302P, C332A | | |
| Neu2-M208 | M1D, V6Y, P62G, A93E, I187K, | ++ | ++++ |
| | W302Q, C332A | | |
| Neu2-M209 | M1D, V6Y, P62G, A93E, I187K, | ++ | +++++ |
| | W302R, C332A | | |
| Neu2-M210 | M1D, V6Y, P62G, A93E, I187K, | ++ | ++++ |
| | W302S, C332A | | |
| Neu2-M211 | M1D, V6Y, P62G, A93E, I187K, | ++ | ++++ |
| | W302T, C332A | | |
| Neu2-M212 | M1D, V6Y, P62G, A93E, I187K, | + | ++++ |
| | W302V, C332A | | |
| Neu2-M213 | M1D, V6Y, P62G, A93E, I187K, | + | ++++ |
| | W302Y, C332A | | |
| Neu2-M214 | M1D, V6Y, P62G, A93E, I187K, | ++ | ++++ |
| | S301A, W302A, C332A | | |
| Neu2-M215 | M1D, V6Y, P62G, A93E, I187K, | + | ++++ |
| | S301A, W302R, C332A | | |
| Neu2-M216 | M1D, V6Y, P62G, A93E, I187K, | ++ | ++++ |
| | S301A, W302S, C332A | | |
| Neu2-M217 | M1D, V6Y, P62G, A93E, I187K, | ++ | ++++ |
| | S301A, W302T, C332A | | |
| Neu2-M218 | M1D, V6Y, P62G, A93E, I187K, | + | ++++ |
| | S301K, W302S, C332A | | |
| Neu2-M219 | M1D, V6Y, P62G, A93E, I187K, | ++ | +++++ |
| | S301K, W302R, C332A | | |
| Neu2-M219 | M1D, V6Y, P62G, A93E, I187K, | ++ | ++++ |
| | S301K, W302T, C332A | | |
| Neu2-M220 | M1D, V6Y, P62G, A93E, I187K, | + | ++++ |
| | S301N, W302S, C332A | | |
| Neu2-M221 | M1D, V6Y, P62G, A93E, I187K, | ++ | ++++ |
| | S301N, W302T, C332A | | |
| Neu2-M222 | M1D, V6Y, P62G, A93E, I187K, | + | ++++ |
| | S301T, W302R, C332A | | |

### Example 5

[0349] This example describes the construction of recombinant human sialidases with mutations that reduce proteolytic cleavage.

[0350] Neu2-M106 (as described in Example 2, and with amino acid sequence SEQ ID NO: 48) was expressed as an Fc-fused single chain protein using a CHO cell expression system in a large scale (10 L) high cell density production and purified with a protein A column. The resulting protein was analyzed by SDS-PAGE. Results are shown in FIG. 24. Under reducing conditions, the protein included a mixture of full length (70 kDa, approx. 50%) and cleaved (40 kDa and 30 kDa, approx. 50%) fractions. However, in non-reducing conditions, there was no cleavage and the protein remained as a single chain (FIG. 24). Additionally, when Neu2-M106 was expressed on a smaller scale (with a shorter duration of cell culture and lower cell density) there was no cleavage and the protein remained as a single chain. A preliminary mass spectrometry analysis showed that the 40 kDa and 30 kDa molecular weight fractions observed under reducing conditions following large scale production are a result of cleavage between amino acid residues R243 and V244 of the sialidase. The enzymatic activity of cleaved Neu2-M106 was similar to that of uncleaved Neu2-M106.

[0351] It was hypothesized that the cleavage of Neu2-M106 could be due to the activity of intracellular proteases released as a result of cell lysis during protein production, harvesting, and/or purification. To test this hypothesis, cleaved Neu2-M106 (prepared using the large scale-production described above that results in cleavage) and uncleaved Neu2-M106 (prepared using the smaller scale production described above that does not result in cleavage) were both incubated with trypsin and analyzed by SDS-PAGE under reducing conditions (FIG. 25). Briefly, trypsin digestion reactions were performed by incubation of trypsin (5 μL, 0.005% solution in PBS) with Neu2-M106 (25 μL, 0.25 mg/mL in PBS pH 8.0) for 5 minutes on ice. Reactions were stopped by addition of LDS gel loading buffer (5 μL) and run on a reducing SDS-PAGE gel to observe trypsin mediated cleavage. The SDS-PAGE analysis showed that incubation of the uncleaved Neu2-M106 with trypsin resulted in the same cleavage pattern as that of the cleaved Neu2-M106. Additionally, incubation of the cleaved Neu2-M106 with trypsin resulted in increased intensity of the bands corresponding to the cleavage products.

[0352] Neu2-M106 was also incubated with trypsin in the presence of various protease inhibitors. Briefly, trypsin digestion reactions were performed by incubation of trypsin (0.005%) with Neu2-M106 (0.5 mg/mL) and protease inhibitor for 5 minutes on ice. Reactions were stopped by addition of LDS gel loading buffer and run on a reducing SDS-PAGE gel to observe trypsin mediated cleavage. Inhibitors used included iron citrate (at 0.3 and 5 mM), aprotinin (at 5,000 and 20,000 U/mL), AEBSF (at 0.1 and 1 mM), leupeptin (at 1 and 10 μM) or E-64 (at 1 and 10 μM). As seen in FIG. 26, protease inhibitors reduced the extent of trypsin cleavage.

[0353] Together, these results confirm that cleavage of Neu2-M106 following large-scale production is due to trypsin or a member of a similar class of proteases.

[0354] Next, recombinant human sialidases with mutations that increase resistance to trypsin cleavage were rationally designed.

[0355] Unless indicated otherwise, in the remainder of this Example mutant sialidases were expressed as secreted proteins with a C-terminal human Fc tag in Expi293F cells (on a 50 mL scale) using the pCEP4 mammalian expression vector. The resulting protein was purified using a Protein A column. Expression was assayed using a ForteBio Octet with anti-human Fc sensors and Western blot and enzymatic activity was assayed using the fluorogenic substrate 4MU-NeuAc as described above. Protease cleavage was assayed by SDS-PAGE as described above.

[0356] First, R243 was mutated to different polar/charged amino acids such as K, E, H, N and Q. However, these mutations of R243 resulted in complete loss of activity and reduction in expression yields. As shown in FIG. 27A, which provides a sequence alignment of various human and non-human sialidases, R243 is conserved among sialidases. Next, various amino residues surrounding the cleavage site were mutated and tested for expression, activity and trypsin cleavage resistance. Substitutions and combinations of substitutions that were tested are shown in FIG. 27B. All mutations were tested in a Neu2-M106 background (i.e., including M1D, V6Y, P62G, A93E, I187K, and C332A substitutions).

[0357] Most of the mutant sialidases depicted in FIG. 27B expressed well, however only two of the mutant sialidases (including V244I or A242C mutations) were active. The A242C mutation resulted in greater than 10 fold improved trypsin resistance and slightly lower activity (both relative to Neu2-M106). However, having an unpaired cysteine could be a potential liability, so, A242 was mutated to all 19 other amino acids and assayed for activity and trypsin resistance. As shown in FIG. 28, mutation of A242 to aromatic amino acids such as F, W and Y resulted in a dramatic improvement in trypsin cleavage resistance compared to Neu2-M106 (FIG. 28A) and similar enzymatic activity to Neu2-M106 (FIG. 28B). SEC analysis showed that proteins containing each of these mutations had a similar pattern to that of Neu2-M106 and more than 95% monomer content (FIG. 28C).

[0358] Structural analysis showed that replacing A242 with an aromatic amino acid could provide additional hydrophobic or stacking interactions to L260 and V265 (nonpolar amino acids located in the vicinity of the A242). Therefore, L260 and V265 were also mutated to phenylalanine. Along with these mutations several other rationally designed mutants, which could provide extra stability, for example by increasing stacking interactions, were also tested for expression, activity, and protease resistance.

[0359] Select results are shown in FIG. 29. As shown in FIG. 29, the combination of R241Y and A242F mutations (Neu2-M255) resulted in the most resistance to trypsin cleavage (a greater than 10 fold improved trypsin resistance relative to Neu2-M106).

[0360] Expression, activity, and protease resistance levels for the mutant sialidases are shown in TABLE 30. In TABLE 30, enzymatic activity is indicated as “++,” which denotes activity comparable to wild-type Neu2, “+,” which denotes activity lower than wild-type Neu2, or “−,” which denotes no detectable activity, and expression is indicated as “+++++”, which denotes expression >40 fold higher than wildtype-Neu2, “++++”, which denotes expression >15 fold higher than wildtype-Neu2, “+++,” which denotes expression >6 fold higher than wild-type Neu2, “++,” which denotes expression 2-5 fold higher than wild-type Neu2, “+,” which denotes expression comparable to wild-type Neu2, or “−,” which denotes no detectable expression. Protease/trypsin resistance is indicated as “+++,” which denotes resistance >10 fold higher than Neu2-M106; “++,” which denotes resistance ≥5 fold higher than Neu2-M106, “+,” which denotes resistance comparable to Neu2-M106, or “−,” which denotes resistance lower than Neu2-M106. NT=not tested.

TABLE 30

| | | | | Protease |
|---|---|---|---|---|
| Identifier | Mutation(s) | Activity | Expression | Resistance |
| Neu2-M223 | M1D, V6Y, P62G, | ++ | +++++ | + |
| | A93E, I187K, | | | |
| | L240Y, C332A | | | |
| Neu2-M224 | M1D, V6Y, P62G, | + | +++ | +++ |
| | A93E, I187K, | | | |
| | A242C, C332A | | | |
| Neu2-M225 | M1D, V6Y, P62G, | − | ++++ | − |
| | A93E, I187K, | | | |
| | A242D, C332A | | | |
| Neu2-M226 | M1D, V6Y, P62G, | − | +++ | − |
| | A93E, I187K, | | | |
| | A242E, C332A | | | |
| Neu2-M227 | M1D, V6Y, P62G, | ++ | ++++ | ++ |
| | A93E, I187K, | | | |
| | A242F, C332A | | | |
| Neu2-M228 | M1D, V6Y, P62G, | + | +++ | + |
| | A93E, I187K, | | | |
| | A242G, C332A | | | |
| Neu2-M229 | M1D, V6Y, P62G, | + | +++ | + |
| | A93E, I187K, | | | |
| | A242H, C332A | | | |
| Neu2-M230 | M1D, V6Y, P62G, | + | +++ | + |
| | A93E, I187K, | | | |
| | A242I, C332A | | | |
| Neu2-M231 | M1D, V6Y, P62G, | + | ++++ | − |
| | A93E, I187K, | | | |
| | A242K, C332A | | | |
| Neu2-M232 | M1D, V6Y, P62G, | + | +++ | + |
| | A93E, I187K, | | | |
| | A242L, C332A | | | |
| Neu2-M233 | M1D, V6Y, P62G, | + | +++ | + |
| | A93E, I187K, | | | |
| | A242M, C332A | | | |
| Neu2-M234 | M1D, V6Y, P62G, | + | ++++ | ++ |
| | A93E, I187K, | | | |
| | A242N, C332A | | | |
| Neu2-M235 | M1D, V6Y, P62G, | + | +++ | ++ |
| | A93E, I187K, | | | |
| | A242Q, C332A | | | |
| Neu2-M236 | M1D, V6Y, P62G, | + | ++++ | − |
| | A93E, I187K, | | | |
| | A242R, C332A | | | |
| Neu2-M237 | M1D, V6Y, P62G, | + | +++ | − |
| | A93E, I187K, | | | |
| | A242S, C332A | | | |
| Neu2-M238 | M1D, V6Y, P62G, | − | +++ | + |
| | A93E, I187K, | | | |
| | A242T, C332A | | | |
| Neu2-M239 | M1D, V6Y, P62G, | + | +++ | + |
| | A93E, I187K, | | | |
| | A242V, C332A | | | |
| Neu2-M240 | M1D, V6Y, P62G, | ++ | ++++ | ++ |
| | A93E, I187K, | | | |
| | A242W, C332A | | | |
| Neu2-M241 | M1D, V6Y, P62G, | ++ | ++++ | ++ |
| | A93E, I187K, | | | |
| | A242Y, C332A | | | |
| Neu2-M242 | M1D, V6Y, P62G, | ++ | ++++ | ++ |
| | A93E, I187K, | | | |
| | A242F, L260F, | | | |
| | C332A | | | |
| Neu2-M243 | M1D, V6Y, P62G, | + | ++++ | ++ |
| | A93E, I187K, | | | |
| | A242F, V265F, | | | |
| | C332A | | | |
| Neu2-M244 | M1D, V6Y, P62G, | + | ++++ | ++ |
| | A93E, I187K, | | | |
| | A242F, A213C, | | | |
| | C332A | | | |
| Neu2-M245 | M1D, V6Y, P62G, | + | ++++ | ++ |
| | A93E, I187K, | | | |
| | A242F, A213S, | | | |
| | C332A | | | |
| Neu2-M246 | M1D, V6Y, P62G, | ++ | ++++ | ++ |
| | A93E, I187K, | | | |
| | A242F, A213T, | | | |
| | C332A | | | |
| Neu2-M247 | M1D, V6Y, P62G, | + | ++ | NT |
| | A93E, I187K, | | | |
| | A242F, A213N, | | | |
| | C332A | | | |
| Neu2-M248 | M1D, V6Y, P62G, | ++ | ++++ | ++ |
| | A93E, I187K, | | | |
| | A242F, A213C, | | | |
| | S258C, C332A | | | |
| Neu2-M249 | M1D, V6Y, P62G, | ++ | +++++ | + |
| | A93E, I187K, | | | |
| | L240Y, L260F, | | | |
| | C332A | | | |
| Neu2-M250 | M1D, V6Y, P62G, | + | + | NT |
| | A93E, I187K, | | | |
| | L240D, L260T, | | | |
| | C332A | | | |
| Neu2-M251 | M1D, V6Y, P62G, | + | ++ | NT |
| | A93E, I187K, | | | |
| | L240N, L260D, | | | |
| | C332A | | | |
| Neu2-M252 | M1D, V6Y, P62G, | ++ | ++++ | + |
| | A93E, I187K, | | | |
| | L240N, L260T, | | | |
| | C332A | | | |
| Neu2-M253 | M1D, V6Y, P62G, | ++ | ++++ | + |
| | A93E, I187K, | | | |
| | L240N, L260Q, | | | |
| | C332A | | | |
| Neu2-M254 | M1D, V6Y, P62G, | ++ | +++ | ++ |
| | A93E, I187K, | | | |
| | R241A, A242F, | | | |
| | C332A | | | |
| Neu2-M255 | M1D, V6Y, P62G, | ++ | +++ | +++ |
| | A93E, I187K, | | | |
| | R241Y, A242F, | | | |
| | C332A | | | |
| Neu2-M256 | M1D, V6Y, P62G, | ++ | +++++ | ++ |
| | A93E, Q126Y, | | | |
| | I187K, L240Y, | | | |
| | A242F, Q270T, | | | |
| | C332A | | | |
| Neu2-M257 | M1D, V6Y, P62G, | ++ | ++++ | + |
| | A93E, I187K, | | | |
| | V244I, C332A | | | |
| Neu2-M258 | M1D, V6Y, P62G, | + | +++ | ++ |
| | A93E, I187K, | | | |
| | A242C, V244K, | | | |
| | C332A | | | |

### Example 6

[0361] This Example describes the construction and expression of antibody-sialidase genetic fusion proteins, and antibody sialidase conjugates (ASCs) containing the fusion proteins, with mutated human sialidases.

[0362] A Janus Antibody Sialidase Conjugate (ASC) was made using Neu2 with M1D, V6Y, P62G, A93E, I187K and C332A substitutions and Trastuzumab, referred to in this Example as “Janus Trastuzumab”. This Janus Trastuzumab (including a first polypeptide chain with amino acid sequence SEQ ID NO: 66, encoded by nucleotide sequence SEQ ID NO: 86, a second polypeptide chain with amino acid sequence SEQ ID NO: 67, encoded by nucleotide sequence SEQ ID NO: 87, and a third polypeptide chain with amino acid sequence SEQ ID NO: 68, encoded by nucleotide sequence SEQ ID NO: 88) was expressed and characterized for purity using SDS-PAGE and enzymatic activity using 4MU-NeuAc as described below.

[0363] Janus Trastuzumab was expressed in a 1 L transfection of Expi293 human cells using the pCEP4 mammalian expression vector. Janus Trastuzumab was purified using Protein A, followed by cation exchange chromatography (Hitrap SP-HP, GE Lifesciences). Purified proteins were analyzed by SDS-PAGE (FIG. 12), and SEC-HPLC (FIG. 13). Expression yield was 30 mg/L, with 90% monomer purity as determined by SEC-HPLC.

[0364] The enzymatic activity of the recombinantly expressed Janus Trastuzumab was assayed by measuring the release of sialic acid from the fluorogenic substrate 4-methylumbelliferyl-N-acetylneuraminic acid (4MU-NeuAc). Specifically, an enzyme kinetics assay was performed using a fixed concentration of enzyme at 2 μg/well, which was incubated with fluorogenic substrate 4MU-NeuAc at concentrations ranging from 4000 μM to 7.8 μM. As shown in FIG. 14, Janus Trastuzumab was enzymatically active, with a Km of 0.48 mM.

[0365] Janus Trastuzumab was tested for antigen (HER2) binding by using ForteBio Octet with the ASC captured on anti-Fc sensors with dipping into serial dilutions of His-tagged HER2 (50 to 0.78 nM at 1:2 dilutions). Janus Trastuzumab bound to HER2 with comparable binding affinity to trastuzumab (FIG. 15).

### Example 7

[0366] This Example describes the in vivo administration of antibody sialidase conjugates (ASCs) containing bacterial sialidases.

[0367] The following ASCs were made and tested in this Example: (i) a Janus ASC including Salmonella typhimurium sialidase (St-sialidase) and trastuzumab (including a first polypeptide chain with amino acid sequence SEQ ID NO: 66, encoded by nucleotide sequence SEQ ID NO: 86, a second polypeptide chain with amino acid sequence SEQ ID NO: 67, encoded by nucleotide sequence SEQ ID NO: 87, and a third polypeptide chain with amino acid sequence SEQ ID NO: 90, encoded by nucleotide sequence SEQ ID NO: 91); (ii) a Raptor ASC including St-sialidase and trastuzumab (including first and fourth polypeptide chains with amino acid sequence SEQ ID NO: 66, encoded by nucleotide sequence SEQ ID NO: 86, and second and third polypeptide chains with amino acid sequence SEQ ID NO: 92, encoded by nucleotide sequence SEQ ID NO: 93); and (iii) a Lobster ASC including St-sialidase and an scFv derived from trastuzumab (including first and second polypeptide chains with amino acid sequence SEQ ID NO: 94, encoded by nucleotide sequence SEQ ID NO: 95).

[0368] These ASCs were compared to trastuzumab in a mouse syngeneic tumor model injected with a murine breast cancer cell line expressing human HER2 (EMT6-hHER2 cells). Female BALB/c mice, 6-8 weeks of age, were inoculated subcutaneously in the right lower flank region with EMT6-HER2 tumor cells (5×105) in 0.1 ml of PBS for tumor development. Mice were randomly allocated to 8 groups when tumors reached 50-100 mm³, mean ˜75-100 mm³. Treatment groups are described in TABLE 31 with dosing schedule indicated post randomization. Anti-mouse NK1.1 (Clone: PK136; BioXcell, 621717N1), anti-mouse CD8α (Clone: 53-6.7; BioXcell, BE0004-1) and liposomal clodronate (FormuMax Scientific, Inc.) were included in treatment groups as indicated.

TABLE 31

| | Animal | | Dose | | Dose | | | Schedule |
|---|---|---|---|---|---|---|---|---|
| Group | No. | Treatment | (mg/kg) | | volume (μL/g) | | Route | (Days) |
| 1 | 8 | Vehicle (PBS) | NA | | 10 | | i.p. | 0, 3, 7, 10, 14, 17 |
| 2 | 8 | Trastuzumab | 10 | | 10 | | i.p | 0, 3, 7, 10, 14, 17 |
| 3 | 8 | Raptor | 10 | | 10 | | i.p | 0, 3, 7, 10, 14, 17 |
| 4 | 8 | Janus | 10 | | 10 | | i.p. | 0, 3, 7, 10, 14, 17 |
| 5 | 8 | Lobster | 10 | | 10 | | i.p. | 0, 3, 7, 10, 14, 17 |
| 6 | 8 | Janus | 10 | | 10 | | i.p. | 0, 3, 7, 10, 14, 17 |
| | | anti-mouse NK1.1 | 10 | | 10 | | i.p. | 0, 3, 7, 10, 14, 17 |
| | | (Clone: PK136) | | | | | | |
| 7 | 8 | Janus | 10 | | 10 | | i.p. | 0, 3, 7, 10, 14, 17 |
| | | anti-mouse CD8α | 10 | | 10 | | i.p. | 0, 3, 7, 10, 14, 17 |
| | | (Clone: 53-6.7) | | | | | | |
| 8 | 8 | Janus | 10 | | 10 | | i.p. | 0, 3, 7, 10, 14, 17 |
| | | liposomal | 0.5 | mg/mouse | 100 | μL/mouse | i.p. | TIW × 2 wks |
| | | clodronate | | | | | | |

[0369] The results from for treatment with trastuzumab, and Raptor, Janus and Lobster ASCs are shown in FIGS. 16A, 16B, 16C and 16D respectively. As can be seen, trastuzumab resulted in no complete responses in eight individual mice as treated (defined as regression below the limit of palpation at any point for the duration of the study, FIG. 16A). This is in contrast to Raptor, which demonstrated 2 out of 8 animals with a complete response (FIG. 16B), Janus which demonstrated 3 out of 8 animals with a complete response (FIG. 16C) and Lobster which demonstrated 2 out of 8 animals with a complete response (FIG. 16D).

[0370] The results of administration of Janus with NK depletion (anti-mouse NK1.1), macrophage depletion (liposomal clodronate) and CD8 T cell depletion (anti-mouse CD8a) are shown in FIG. 17. As can be seen, compared to Janus treatment alone (FIG. 16C), where there was a complete response in 3 out of 8 animals, NK depletion reduced the number of complete responses to 1 out of 8 animals (FIG. 17A). Macrophage depletion also reduced the number of complete responses to 1 out of 8 animals (FIG. 17B). CD8 T cell depletion completely reversed the effects of Janus, with no animals showing a complete response (FIG. 17C). FIG. 17D shows the mean tumor volume for vehicle, Janus alone, trastuzumab alone and Janus with NK, macrophage and CD8 T cell depletions. These results demonstrate that innate immunity (NK and macrophage dependent) as well as adaptive immunity (CD8 T cells) contribute to in vivo ASC activity.

### Example 8

[0371] This Example describes the in vivo administration of antibody sialidase conjugates (ASCs) with bacterial sialidases.

[0372] The following ASCs were made and tested in this Example: (i) a Janus ASC including Salmonella typhimurium sialidase (St-sialidase) and trastuzumab (including a first polypeptide chain with amino acid sequence SEQ ID NO: 66, encoded by nucleotide sequence SEQ ID NO: 86, a second polypeptide chain with amino acid sequence SEQ ID NO: 67, encoded by nucleotide sequence SEQ ID NO: 87, and a third polypeptide chain with amino acid sequence SEQ ID NO: 90, encoded by nucleotide sequence SEQ ID NO: 91); and (ii) a Janus ASC including St-sialidase with two loss of function mutations, D100V and G231V, and trastuzumab (“Janus-LOF,” including a first polypeptide chain with amino acid sequence SEQ ID NO: 66, encoded by nucleotide sequence SEQ ID NO: 86, a second polypeptide chain with amino acid sequence SEQ ID NO: 67, encoded by nucleotide sequence SEQ ID NO: 87, and a third polypeptide chain with amino acid sequence SEQ ID NO: 96, encoded by nucleotide sequence SEQ ID NO: 97).

[0373] These ASCs were tested in a mouse syngeneic orthotopic tumor model injected with an independent EMT6 cell line expressing human HER2 (EMT6-hHER2 cells as described in D'Amico et al. (2016) ANNALS OF ONCOLOGY, Volume 27, Issue suppl_8, 41P. Female BALB/c mice, 6-8 weeks of age, were inoculated via intra mammary implantation with EMT6-HER2 tumor cells (5×10⁶). Mice were randomly allocated to 6 groups when tumors reached approximately 250 mm³. The treatment groups are described in TABLE 32 with dosing schedule indicated post randomization. Anti-mouse PD1 was obtained from BioXcell (RMP1-14, Cat. #665418F1).

TABLE 32

| | Animal | | Dose | Dose volume | | Schedule |
|---|---|---|---|---|---|---|
| Group | No. | Treatment | (mg/kg) | (μL/g) | Route | (Days) |
| 1 | 6 | Vehicle (PBS) | NA | 10 | i.p. | 0, 3, 7, 10 |
| 2 | 6 | Trastuzumab | 10 | 10 | i.p. | 0, 3, 7, 10 |
| 3 | 6 | Janus | 10 | 10 | i.p. | 0, 3, 7, 10 |
| 4 | 6 | Janus Loss of | 10 | 10 | i.p. | 0, 3, 7, 10 |
| | | Function (LOF) | | | | |
| 5 | 6 | anti-mouse PD1 | 10 | 10 | i.p. | 0, 3, 7, 10 |
| 6 | 6 | Janus | 10 | 10 | i.p. | 0, 3, 7, 10 |
| | | anti-mouse PD1 | 10 | 10 | i.p. | 0, 3, 7, 10 |

[0374] The results for Groups 1 through 4 (vehicle, trastuzumab, Janus and Janus LOF) are shown in FIG. 18A. As can be seen, 3 out of 6 animals treated with Janus had a complete regression of tumor growth. Notably, Janus LOF and trastuzumab were both comparable to vehicle treated animals.

[0375] The 3 mice with a complete regression (“cured mice”) were rechallenged with either the same EMT6-HER2 cells used originally or parental EMT6 cells (lacking engineered human HER2 expression). EMT6 cells and EMT6-HER2 cells were inoculated subcutaneously in the right or left lower flank region respectively (5×10⁵) in 0.1 ml of PBS for tumor development of all three cured mice. EMT6-HER2 cells were also inoculated subcutaneously into naïve mice as a control. As can be seen in FIG. 18B, neither EMT6-HER2 cells nor parental EMT6 cells resulted in tumor growth in the cured mice while EMT6-HER2 cells developed into tumors as expected in the naïve mice. These results suggest that the antibody sialidase conjugates of the present invention are capable of inducing long term memory against tumors. In addition, the long term memory is towards the tumor cell and is independent of the originally targeted cancer antigen (HER2 in this case).

[0376] The results for Groups 1, 5 and 6 (vehicle, anti-mouse PD1 and anti-mouse PD1 combined with Janus) are shown in FIG. 19A and FIG. 19B. While anti-mouse PD1 had good activity with 4 out of 6 mice demonstrating complete regressions (similar to Janus alone with 3 out of 6 mice demonstrating complete regression, see FIG. 18A), the combination of anti-mouse PD1 with Janus demonstrated complete regression of tumor growth in all 6 mice (FIG. 19B). There was no body weight loss in any of the animals given this combination.

### Example 9

[0377] This Example describes the in vivo administration of antibody sialidase conjugates (ASCs) with bacterial sialidases.

[0378] A Janus ASC including Salmonella typhimurium sialidase (St-sialidase) and trastuzumab (including a first polypeptide chain with amino acid sequence SEQ ID NO: 66, encoded by nucleotide sequence SEQ ID NO: 86, a second polypeptide chain with amino acid sequence SEQ ID NO: 67, encoded by nucleotide sequence SEQ ID NO: 87, and a third polypeptide chain with amino acid sequence SEQ ID NO: 90, encoded by nucleotide sequence SEQ ID NO: 91) was made and tested in this Example.

[0379] The ASC was tested in a mouse syngeneic tumor model injected with a B16 melanoma cell line expressing human HER2 (B16D5-HER2, Surana et al. CANCER IMMUNOL RES, 2(11): 1103-1112). Female C57BL/6 mice, 6-8 weeks of age, were inoculated subcutaneously in the right lower flank region with B16D5-HER2 tumor cells (5×10⁵). Mice were randomly allocated to 3 groups when tumors reached approximately 50 to 100 mm³. Treatment groups are described in TABLE 33 with dosing schedule indicated post randomization. Anti-mouse PD1, obtained from BioXcell (RMP1-14, Cat. No. 665418F1) and anti-mouse CTLA4, obtained from BioXcell (9D9, Cat. #BE0164), were used in combination.

TABLE 33

| | | | | Dose | | |
|---|---|---|---|---|---|---|
| | No. of | | Dose | volume | | Schedule |
| Group | Animals | Treatment | (mg/kg) | (μL/g) | Route | (Days) |
| 1 | 6 | Janus | NA | 10 | i.p. | 0, 3, 7, 10 |
| 2 | 6 | Trastuzumab | 10 | 10 | i.p. | 0, 3, 7, 10 |
| 3 | 6 | anti-mouse | 10 | 10 | i.p. | 0, 3, 7, 10 |
| | | CTLA4 | | | | |
| | | anti-mouse | 10 | 10 | i.p. | 0, 3, 7, 10 |
| | | PD1 | | | | |

[0380] The B16 melanoma mouse model is considered a difficult tumor model to treat with immuno-oncology approaches. A comparison of Janus to a combination of anti-mouse PD1 and anti-mouse CTLA4 was carried out. The results are shown in FIG. 20. Anti-mouse PD1 combined with anti-mouse CTLA4 had an impact on B16D5-HER2 tumor growth, but this combination also demonstrated significant weight loss in the treated animals. By comparison, Janus demonstrated a more robust anti-tumor activity with no significant weight loss. Trastuzumab alone demonstrated marginal activity in this model.

### Example 10

[0381] This Example describes the in vivo administration of an antibody sialidase conjugate (ASC) containing a human sialidase.

[0382] Janus Trastuzumab, as described in Example 3, including Neu2 with M1D, V6Y, P62G, A93E, I187K and C332A substitutions and Trastuzumab (including a first polypeptide chain with amino acid sequence SEQ ID NO: 66, encoded by nucleotide sequence SEQ ID NO: 86, a second polypeptide chain with amino acid sequence SEQ ID NO: 67, encoded by nucleotide sequence SEQ ID NO: 87, and a third polypeptide chain with amino acid sequence SEQ ID NO: 68, encoded by nucleotide sequence SEQ ID NO: 88) was made and tested in this Example.

[0383] Janus Trastuzumab was compared to isotype control antibody in a mouse syngeneic tumor model injected with a murine breast cancer cell line stably expressing human HER2 (EMT6-HER2). Female BALB/c mice, 6-8 weeks of age, were inoculated subcutaneously in the right lower flank region with EMT6-HER2 tumor cells (5×10⁵) for tumor development. Mice were randomly allocated to groups of 8 animals each when tumors reached 50-100 mm³, mean ˜75-100 mm³.

[0384] Mice were treated via intraperitoneal injection of 10 mg/kg and tumor volume (mm³) was recorded. FIG. 21 shows individual tumor growth for mice that received treatment with Janus Trastuzumab or control. Significant tumor growth delay was observed following treatment with Janus Trastuzumab in this experiment.

### Example 11

[0385] This example describes the construction of additional recombinant human sialidases with mutations that increase expression and/or activity of the sialidase.

[0386] Additional mutant Neu2 sialidases were constructed including rationally designed substitutions at position A42. A structural analysis of homologous sialidases revealed that transferring the G147R neuraminidase (sialidase) mutation from influenza A(H1N1)pdm09 onto human Neu2 may have stabilizing effects.

[0387] Neu2-M259-Fc (with amino acid sequence SEQ ID NO: 210, encoded by nucleotide sequence SEQ ID NO: 217, and including mutations M1D, V6Y, A42R, P62G, A93E, Q126Y, I187K, A242F, Q270T, and C332A) was expressed in a 1 L transfection of Expi293 human cells using the pCEP4 mammalian expression vector. Neu2-M259-Fc was purified using protein A followed by cation exchange and ceramic hydroxyapatite (CHT) chromatography, quantified with a UV-Vis spectrophotometer (NanoDrop), and examined by SDS-PAGE.

[0388] Additional mutant Neu2 sialidases made and tested in this Example include Neu2-M260-Fc (with amino acid sequence SEQ ID NO: 220, encoded by nucleotide sequence SEQ ID NO: 221, and including mutations M1D, V6Y, P62G, A93E, Q112E, Q126Y, I187K, Q270T, A242F, and C332A), Neu2-M261-Fc (with amino acid sequence SEQ ID NO: 222, encoded by nucleotide sequence SEQ ID NO: 223, and including mutations M1D, V6Y, P62G, A93E, Q126Y, I187K, E225C, Q270T, A290C, A242F, and C332A), Neu2-M106-Fc (described in Example 2), and Neu2-173-Fc (described in Example 4).

[0389] FIG. 30A is an image of an SDS-PAGE gel showing Neu2-M259-Fc under non-reducing and reducing conditions. FIG. 30B is an SEC-HPLC trace for Neu2-M259-Fc, where the monomer species had a retention time of 21.7 minutes, and a monomer content of 96%.

[0390] The enzyme kinetics of Neu2-M259-Fc, Neu2-M260-Fc, Neu2-M261-Fc, Neu2-M106-Fc, and Neu2-173-Fc were assayed by measuring the release of sialic acid from the fluorogenic substrate 4-methylumbelliferyl-N-acetylneuraminic acid (4MU-NeuAc) as described above. A Michaelis-Menton kinetics characterization (measured at a variable substrate concentration) of Neu2-M259-Fc, Neu2-M106-Fc, and Neu2-M173-Fc is depicted in FIG. 31A. Estimated K_{M} values were 0.27 mM (Neu2-M106-Fc), 0.46 mM (Neu2-M173-Fc), and 0.20 mM (Neu2-M259-Fc). Enzyme potency (measured at variable enzyme concentration) of Neu2-M259-Fc, Neu2-M106-Fc, and Neu2-M173-Fc is depicted in FIG. 31B. Approximate EC50 values were 20.7 μg/mL (Neu2-M106-Fc), 38.3 μg/mL (Neu2-M173-Fc), and 15.18 μg/mL (Neu2-M259-Fc).

[0391] The thermal stability of Neu2-M259-Fc, Neu2-M260-Fc, Neu2-M261-Fc, Neu2-M106-Fc, and Neu2-173-Fc were assayed. Samples were prepared at 0.2 mg/mL, and incubated for 15 minutes across a temperature gradient from 37° C. to 80° C. Enzyme activity was then measured by incubation of 2 μg of enzyme with 0.5 mM of 4-MU-Neu5Ac substrate. Tm was determined by fitting enzyme activity curves versus temperature curves. FIG. 32 depicts a thermal stability characterization of Neu2-M259-Fc, Neu2-M106-Fc, and Neu2-173-Fc.

[0392] A summary of certain biochemical attributes of Neu2-Fc variants M106-Fc, M173-Fc, M259-Fc, Neu2-M260-Fc, and Neu2-M261-Fc is depicted in TABLE 34. In TABLE 34, enzymatic activity is indicated as “+++,” which denotes activity >2 fold higher than wild-type Neu2, or “++,” which denotes activity comparable to wild-type Neu2. Together, these results show that Neu2-Fc variants M259-Fc and M260-Fc have improved expression yield and thermal stability relative to the M106-Fc and M173-Fc constructs, and M261-Fc has improved expression yield relative to the M106-Fc and M173-Fc constructs.

TABLE 34

| | | Yield | Tm | Enzyme |
|---|---|---|---|---|
| Name | Mutations | (mg/L) | (° C.) | activity |
| M106-Fc | M1D, V6Y, P62G, A93E, I187K, | 13 | 49.0 | +++ |
| | C332A | | | |
| M173-Fc | M1D, V6Y, P62G, A93E, Q126Y, | 27.2 | 57.1 | ++ |
| | I187K, Q270T, A242F, C332A | | | |
| M259-Fc | M1D, V6Y, A42R, P62G, A93E, | 32 | 61.4 | +++ |
| | Q126Y, I187K, Q270T, A242F, | | | |
| | C332A | | | |
| M260-Fc | M1D, V6Y, P62G, A93E, Q112E, | 34 | 58.7 | +++ |
| | Q126Y, I187K, Q270T, A242F, | | | |
| | C332A | | | |
| M261-Fc | M1D, V6Y, P62G, A93E, Q126Y, | 66 | 55.7 | ++ |
| | I187K, E225C, Q270T, A290C, | | | |
| | A242F, C332A | | | |

[0393] The thermal stability of Neu2-M259-Fc, Neu2-M106-Fc, and Neu2-173-Fc was further assayed by incubating samples at 1 mg/mL at 37° C. for 4 hours, 24 hours, or 5 days. Enzyme activity was then measured using the 4-MU-Neu5Ac assay. Results are depicted in FIG. 34, and show increased thermal stability for Neu2-M259-Fc.

[0394] A systematic analysis of the ten mutations in Neu2 variant M-259-Fc was conducted to determine the contribution of each substitution. Each of the ten mutations in Neu2 variant M-259-Fc was back-mutated to the corresponding residue in wildtype Neu2, resulting in ten variants (M262-Fc through M271-Fc) each having nine mutations. The resulting variants are described in TABLE 35.

TABLE 35

| | Backmutation | | | | AA | Nuc |
|---|---|---|---|---|---|---|
| | Relative to M259-Fc | | | | SEQ | SEQ |
| Name | AA # | Mut | WT | Total Mutations | ID NO | ID NO |
| M259-Fc | | — | — | M1D, V6Y, A42R, P62G, A93E, | 210 | 217 |
| | | | | Q126Y, I187K, Q270T, A242F, C332A | | |
| M262-Fc | 1 | D | M | ΔD, V6Y, A42R, P62G, A93E, Q126Y, | 224 | 225 |
| | | | | I187K, Q270T, A242F, C332A | | |
| M263-Fc | 6 | Y | V | M1D, A42R, P62G, A93E, Q126Y, | 226 | 227 |
| | | | | I187K, Q270T, A242F, C332A | | |
| M173-Fc | 42 | R | A | M1D, V6Y, P62G, A93E, Q126Y, | 228 | 229 |
| | | | | I187K, Q270T, A242F, C332A | | |
| M264-Fc | 62 | G | P | M1D, V6Y, A42R, A93E, Q126Y, | 230 | 231 |
| | | | | I187K, Q270T, A242F, C332A | | |
| M265-Fc | 93 | E | A | M1D, V6Y, A42R, P62G, Q126Y, | 232 | 233 |
| | | | | I187K, Q270T, A242F, C332A | | |
| M266-Fc | 126 | Y | Q | M1D, V6Y, A42R, P62G, A93E, | 234 | 235 |
| | | | | I187K, Q270T, A242F, C332A | | |
| M267-Fc | 187 | K | I | M1D, V6Y, A42R, P62G, A93E, | 236 | 237 |
| | | | | Q126Y, Q270T, A242F, C332A | | |
| M268-Fc | 242 | F | A | M1D, V6Y, A42R, P62G, A93E, | 238 | 239 |
| | | | | Q126Y, I187K, Q270T, C332A | | |
| M269-Fc | 270 | T | Q | M1D, V6Y, A42R, P62G, A93E, | 240 | 241 |
| | | | | Q126Y, I187K, A242F, C332A | | |
| M270-Fc | 332 | A | C | M1D, V6Y, A42R, P62G, A93E, | 242 | 243 |
| | | | | Q126Y, I187K, Q270T, A242F | | |

[0395] M259-Fc, M262-Fc through M270-Fc, and M173-Fc were expressed in Expi293 human cells using the pCEP4 mammalian expression vector, purified using a single step Protein-A purification, quantified with a UV-Vis spectrophotometer (NanoDrop), and examined by SEC-HPLC. Enzyme kinetics were assayed by measuring the release of sialic acid from the fluorogenic substrate 4-methylumbelliferyl-N-acetylneuraminic acid (4MU-NeuAc) as described above. Thermal stability was assayed by incubating samples across a temperature gradient from 37° C. to 80° C., followed by measurement of enzyme activity, as described above. Tm was determined by fitting enzyme activity curves versus temperature curves. Results are depicted in TABLE 36. In TABLE 36, enzymatic activity is indicated as “+++,” which denotes activity >2 fold higher than wild-type Neu2, “++,” which denotes activity comparable to wild-type Neu2, or “+,” which denotes activity lower than wild-type Neu2.

TABLE 36

| | SEC-HPLC | Yield | Tm | Enzyme |
|---|---|---|---|---|
| Name | Monomer % | (mg/L) | (° C.) | activity |
| M259-Fc | 84% | 37.8 | 60 | +++ |
| M262-Fc | 79% | 32.1 | 57.7 | + |
| M263-Fc | 88% | 17.1 | 62 | +++ |
| M173-Fc | 82% | 35.3 | 56 | + |
| M264-Fc | 92% | 22 | 62 | +++ |
| M265-Fc | 81% | 24.9 | 60 | +++ |
| M266-Fc | 90% | 9.6 | 64 | +++ |
| M267-Fc | 70% | 14 | 61 | +++ |
| M268-Fc | 76% | 38 | 57 | +++ |
| M269-Fc | 79% | 42.9 | 53 | ++ |
| M270-Fc | 87% | 30 | 59 | +++ |

[0396] Together, the results showed that removal of each of the individual mutations in M259-Fc negatively impacted at least one of monomer percentage, yield, thermal stability, or enzyme activity. In other words, each of the mutations were found to contribute to at least one of the monomer percentage, yield, stability and activity of the M259-Fc construct.

### Example 12

[0397] This Example describes the in vivo administration of a sialidase-Fc fusion protein containing a human sialidase.

[0398] A Neu2-Fc fusion protein, including Neu2 with M1D, V6Y, A42R, P62G, A93E, Q126Y, I187K, Q270T, A242F, and C332A substitutions and a human IgG1 with a N297A mutation (having an amino acid sequence depicted in SEQ ID NO: 218, and encoded by the nucleotide sequence depicted in SEQ ID NO: 219) was made and tested in this Example. The Neu2-Fc fusion protein was the same as M259-Fc described in Example 11 but with an additional N297A mutation, and is referred to as M259-Fc-N297A.

[0399] M259-Fc-N297A was tested in a transgenic mouse engineered to express human PD-L1 and human PD-1 and where mouse PD-L1 and mouse PD-1 have been disrupted (Biocytogen Inc.). Mice, 6-8 weeks of age, were inoculated subcutaneously in the right lower flank region with a human PD-L1 expressing MC38 tumor cell line for tumor development. Mice were randomly allocated to 3 groups of 8 animals each when tumors reached 100-130 mm³ (mean ˜111 mm³) and treated as shown in TABLE 37.

TABLE 37

| Group | Treatment | Dose | Route | Schedule |
|---|---|---|---|---|
| 1 | Isotype Control | 10 mg/kg | IP | Every |
| 2 | M259-Fc-N297A | 5 mg/kg | | other day; |
| 3 | Atezolizumab | 5 mg/kg | | 8 doses |

[0400] Mice were treated with intraperitoneal injections of 5 mg/kg of M259-Fc-N297A, 5 mg/kg of anti-PD-L1 antibody atezolizumab, or 10 mg/kg of isotype control every other day for 8 doses, and tumor volume (mm³) was recorded. As shown in FIG. 33A (average tumor volume throughout the course of the experiment) and FIG. 33B (tumor volume of individual mice on day 21), mice treated with M259-Fc-N297A exhibited reduced tumor volume compared to mice treated with the isotype control antibody.

### Example 13

[0401] This Example describes the construction and expression of anti-HER2 antibody-sialidase genetic fusion proteins, and anti-HER2 antibody sialidase conjugates (ASCs) containing the fusion proteins, with mutated human sialidases.

[0402] A Janus Antibody Sialidase Conjugate (ASC) was made using Neu2 with M1D, V6Y, A42R, P62G, A93E, Q126Y, I187K, A242F, Q270T, and C332A substitutions and trastuzumab. This ASC, referred to as “Janus Trastuzumab 2,” included a first polypeptide chain with amino acid sequence SEQ ID NO: 66, encoded by nucleotide sequence SEQ ID NO: 86, a second polypeptide chain with amino acid sequence SEQ ID NO: 189, encoded by nucleotide sequence SEQ ID NO: 245, and a third polypeptide chain with amino acid sequence SEQ ID NO: 205, encoded by nucleotide sequence SEQ ID NO: 246.

[0403] Janus Trastuzumab 2 was expressed in a 1,000 mL transfection of Expi293 human cells using the pCEP4 mammalian expression vector. The ASC was purified using protein A, cation exchange and ceramic hydroxyapatite (CHT) chromatography, quantified with a UV-Vis spectrophotometer (NanoDrop), and examined by SDS-PAGE. Janus Trastuzumab 2 expressed well with 95% monomer purity as determined by SEC-HPLC (FIG. 35).

[0404] The enzymatic activity of the recombinantly expressed Janus Trastuzumab 2 was assayed by measuring the release of sialic acid from the fluorogenic substrate 4-methylumbelliferyl-N-acetylneuraminic acid (4MU-NeuAc), as described above. Janus Trastuzumab 2 was enzymatically active, with a Vmax of 2.2×108.

[0405] Janus Trastuzumab 2 was tested for antigen (HER2) binding by using ForteBio Octet with the ASC captured on anti-Fc sensors with dipping into serial dilutions of HER2 (titrated from 100 nM in a 2× series dilution). The buffer reference was subtracted from the signal and aligned to the baseline. KD, Kon and Koff values were generated using 1:1 fitting model. Janus Trastuzumab 2 bound to HER2 with a KD of 5.5E-10, Kon of 1.24E06 (1/Ms), and a Koff of 6.91E-04 (1/s) as shown in FIG. 36.

### Example 14

[0406] This Example describes the in vivo administration of anti-HER2 antibody sialidase conjugates (ASCs) containing human sialidases.

[0407] Janus Trastuzumab 2, as described above in Example 13, and including a first polypeptide chain with amino acid sequence SEQ ID NO: 66, encoded by nucleotide sequence SEQ ID NO: 86, a second polypeptide chain with amino acid sequence SEQ ID NO: 189, encoded by nucleotide sequence SEQ ID NO: 245, and a third polypeptide chain with amino acid sequence SEQ ID NO: 205, encoded by nucleotide sequence SEQ ID NO: 246, was made and tested in this Example.

[0408] Janus Trastuzumab 2 was compared to isotype control antibody and trastuzumab in a mouse syngeneic tumor model injected with a murine breast cancer cell line stably expressing human HER2 (EMT6-HER2). Mice, 6-8 weeks of age, were inoculated subcutaneously in the right lower flank region with HER2-expressing cells for tumor development. Mice were randomly allocated to 5 groups of 8 animals each when tumors reached a mean ˜75-100 mm³ and treated as shown in TABLE 38.

TABLE 38

| Group | Treatment | Dose | | Route | Schedule |
|---|---|---|---|---|---|
| 1 | Isotype Control | 10 | mg/kg | IP | Every |
| 2 | Trastuzumab | 1 | mg/kg | | other day; |
| 3 | Trastuzumab | 10 | mg/kg | | 8 doses |
| 4 | Janus Trastuzumab 2 | 1 | mg/kg | | |
| 5 | Janus Trastuzumab 2 | 10 | mg/kg | | |

[0409] Mice were treated with intraperitoneal (IP) injections of 10 mg/kg of trastuzumab, Janus Trastuzumab 2, or isotype control every other day, and tumor volume (mm³) was recorded. Complete Responses (CR) were defined as regression below the limit of palpitation at any point during the study and Partial Responses (PR) were defined as palpable tumors which were not.

[0410] Tumor volumes for individual mice are shown in FIG. 37A-37E. As depicted, Janus Trastuzumab 2 exhibited increased anti-tumor activity based on CRs and PRs as compared to equivalent doses of trastuzumab. Mean tumor volumes are shown in FIG. 37F. Collectively, these results show that the Janus Trastuzumab 2 construct showed comparable or greater activity than trastuzumab.

### INCORPORATION BY REFERENCE

[0411] The entire disclosure of each of the patent and scientific documents referred to herein is incorporated by reference for all purposes. Additionally, the entire disclosure of each of U.S. Provisional Patent Application No. 62/870,354, filed Jul. 3, 2019, U.S. Provisional Patent Application No. 62/956,957, filed Jan. 3, 2020, International (PCT) Patent Application No. PCT/US20/40815, filed Jul. 3, 2020, U.S. Provisional Patent Application No. 62/870,348, filed Jul. 3, 2019, U.S. Provisional Patent Application No. 62/956,977, filed Jan. 3, 2020, International (PCT) Patent Application No. PCT/US20/40814, filed Jul. 3, 2020, U.S. Provisional Patent Application No. 62/870,341, filed Jul. 3, 2019, U.S. Provisional Patent Application No. 62/957,041, filed Jan. 3, 2020, and International (PCT) Patent Application No. PCT/US20/40816, filed Jul. 3, 2020, are incorporated by reference for all purposes.

### EQUIVALENTS

[0412] The invention may be embodied in other specific forms without departing from the spirit or essential characteristics thereof. The foregoing embodiments are therefore to be considered in all respects illustrative rather than limiting on the invention described herein. Scope of the invention is thus indicated by the appended claims rather than by the foregoing description, and all changes that come within the meaning and range of equivalency of the claims are intended to be embraced therein.

The application's sequence listing, which the Patent Office published only in electronic form, follows.

SEQUENCE LISTING (349 sequences)

SEQ ID NO: 1 - protein, 380 aa, Homo sapiens
MASLPVLQKESVFQSGAHAYRIPALLYLPGQQSLLAFAEQRASKKDEHAELIVLRRGDYDAPTHQVQWQAQEVVAQARLDGHRSMNPCPLYDAQTGTLFLFFIAIPGQVTEQQQLQTRANVTRLCQVTSTDHGRTWSSPRDLTDAAIGPAYREWSTFAVGPGHCLQLHDRARSLVVPAYAYRKLHPIQRPIPSAFCFLSHDHGRTWARGHFVAQDTLECQVAEVETGEQRVVTLNARSHLRARVQAQSTNDGLDFQESQLVKKLVEPPPQGCQGSVISFPSPRSGPGSPAQWLLYTHPTHSWQRADLGAYLNPRPPAPEAWSEPVLLAKGSCAYSDLQSMGTGPDGSPLFGCLYEANDYEEIVFLMFTLKQAFPAEYLPQ

SEQ ID NO: 2 - protein, 385 aa, Mus musculus
MEDLRPMATCPVLQKETLFRTGVHAYRIPALLYLKKQKTLLAFAEKRASKTDEHAELIVLRRGSYNEATNRVKWQPEEVVTQAQLEGHRSMNPCPLYDKQTKTLFLFFIAVPGRVSEHHQLHTKVNVTRLCCVSSTDHGRTWSPIQDLTETTIGSTHQEWATFAVGPGHCLQLRNPAGSLLVPAYAYRKLHPAQKPTPFAFCFISLDHGHTWKLGNFVAENSLECQVAEVGTGAQRMVYLNARSFLGARVQAQSPNDGLDFQDNRVVSKLVEPPHGCHGSVVAFHNPISKPHALDTWLLYTHPTDSRNRTNLGVYLNQMPLDPTAWSEPTLLAMGICAYSDLQNMGQGPDGSPQFGCLYESGNYEEIIFLIFTLKQAFPTVFDAQ

SEQ ID NO: 3 - protein, 5 aa, Mus musculus
EDLRP

SEQ ID NO: 4 - protein, 6 aa, Mus musculus
MEDLRP

SEQ ID NO: 5 - protein, 227 aa, Artificial Sequence
  Description of Artificial Sequence: Synthetic polypeptide
DKTHTCPPCPAPELLGGPSVFLFPPKPKDTLMISRTPEVTCVVVDVSHEDPEVKFNWYVDGVEVHNAKTKPREEQYNSTYRVVSVLTVLHQDWLNGKEYKCKVSNKALPAPIEKTISKAKGQPREPQVYTLPPSREEMTKNQVSLTCLVKGFYPSDIAVEWESNGQPENNYKTTPPVLDSDGSFFLYSKLTVDKSRWQQGNVFSCSVMHEALHNHYTQKSLSLSPGK

SEQ ID NO: 6 - DNA, 1143 bp, Salmonella typhimurium
acagtggaaaagtccgtggtgttcaaggccgagggcgagcacttcaccgaccagaaaggcaataccatcgtcggctctggcagcggcggcaccaccaagtactttagaatccccgccatgtgcaccaccagcaagggcaccattgtggtgttcgccgacgccagacacaacaccgccagcgatcagagcttcatcgataccgctgccgccagatctaccgatggcggcaagacctggaacaagaagatcgccatctacaacgaccgcgtgaacagcaagctgagcagagtgatggaccctacctgcatcgtggccaacatccagggcagagaaaccatcctggtcatggtcggaaagtggaacaacaacgataagacctggggcgcctacagagacaaggcccctgataccgattgggacctcgtgctgtacaagagcaccgatgacggcgtgaccttcagcaaggtggaaacaaacatccacgacatcgtgaccaagaacggcaccatctctgccatgctcggcggcgttggatctggcctgcaactgaatgatggcaagctggtgttccccgtgcagatggtccgaacaaagaatatcaccaccgtgctgaataccagcttcatctacagcaccgacggcatcacatggtccctgcctagcggctactgtgaaggctttggcagcgagaacaacatcatcgagttcaacgccagcctggtcaacaacatccggaacagcggcctgcggagaagcttcgagacaaaggacttcggaaagacgtggaccgagtttcctccaatggacaagaaggtggacaaccggaaccacggcgtgcagggcagcacaatcacaatccctagcggcaacaaactggtggccgctcactctagcgcccagaacaagaacaacgactacaccagaagcgacatcagcctgtacgcccacaacctgtacagcggcgaagtgaagctgatcgacgacttctaccccaaagtgggcaatgccagcggagccggctacagctgtctgagctaccggaaaaatgtggacaaagaaaccctgtacgtggtgtacgaggccaacggcagcatcgagtttcaggacctgagcagacatctgcccgtgatcaagagctacaac

SEQ ID NO: 7 - protein, 364 aa, Homo sapiens
ENDFGLVQPLVTMEQLLWVSGRQIGSVDTFRIPLITATPRGTLLAFAEARKMSSSDEGAKFIALRRSMDQGSTWSPTAFIVNDGDVPDGLNLGAVVSDVETGVVFLFYSLCAHKAGCQVASTMLVWSKDDGVSWSTPRNLSLDIGTEVFAPGPGSGIQKQREPRKGRLIVCGHGTLERDGVFCLLSDDHGASWRYGSGVSGIPYGQPKQENDFNPDECQPYELPDGSVVINARNQNNYHCHCRIVLRSYDACDTLRPRDVTFDPELVDPVVAAGAVVTSSGIVFFSNPAHPEFRVNLTLRWSFSNGTSWRKETVQLWPGPSGYSSLATLEGSMDGEEQAPQLYVLYEKGRNHYTESISVAKISV

SEQ ID NO: 8 - protein, 428 aa, Homo sapiens
MEEVTTCSFNSPLFRQEDDRGITYRIPALLYIPPTHTFLAFAEKRSTRRDEDALHLVLRRGLRIGQLVQWGPLKPLMEATLPGHRTMNPCPVWEQKSGCVFLFFICVRGHVTERQQIVSGRNAARLCFIYSQDAGCSWSEVRDLTEEVIGSELKHWATFAVGPGHGIQLQSGRLVIPAYTYYIPSWFFCFQLPCKTRPHSLMIYSDDLGVTWHHGRLIRPMVTVECEVAEVTGRAGHPVLYCSARTPNRCRAEALSTDHGEGFQRLALSRQLCEPPHGCQGSVVSFRPLEIPHRCQDSSSKDAPTIQQSSPGSSLRLEEEAGTPSESWLLYSHPTSRKQRVDLGIYLNQTPLEAACWSRPWILHCGPCGYSDLAALEEEGLFGCLFECGTKQECEQIAFRLFTHREILSHLQGDCTSPGRNPSQFKSN

SEQ ID NO: 9 - protein, 461 aa, Homo sapiens
MRPADLPPRPMEESPASSSAPTETEEPGSSAEVMEEVTTCSFNSPLFRQEDDRGITYRIPALLYIPPTHTFLAFAEKRSTRRDEDALHLVLRRGLRIGQLVQWGPLKPLMEATLPGHRTMNPCPVWEQKSGCVFLFFICVRGHVTERQQIVSGRNAARLCFIYSQDAGCSWSEVRDLTEEVIGSELKHWATFAVGPGHGIQLQSGRLVIPAYTYYIPSWFFCFQLPCKTRPHSLMIYSDDLGVTWHHGRLIRPMVTVECEVAEVTGRAGHPVLYCSARTPNRCRAEALSTDHGEGFQRLALSRQLCEPPHGCQGSVVSFRPLEIPHRCQDSSSKDAPTIQQSSPGSSLRLEEEAGTPSESWLLYSHPTSRKQRVDLGIYLNQTPLEAACWSRPWILHCGPCGYSDLAALEEEGLFGCLFECGTKQECEQIAFRLFTHREILSHLQGDCTSPGRNPSQFKSN

SEQ ID NO: 10 - protein, 484 aa, Homo sapiens
MGVPRTPSRTVLFERERTGLTYRVPSLLPVPPGPTLLAFVEQRLSPDDSHAHRLVLRRGTLAGGSVRWGALHVLGTAALAEHRSMNPCPVHDAGTGTVFLFFIAVLGHTPEAVQIATGRNAARLCCVASRDAGLSWGSARDLTEEAIGGAVQDWATFAVGPGHGVQLPSGRLLVPAYTYRVDRRECFGKICRTSPHSFAFYSDDHGRTWRCGGLVPNLRSGECQLAAVDGGQAGSFLYCNARSPLGSRVQALSTDEGTSFLPAERVASLPETAWGCQGSIVGFPAPAPNRPRDDSWSVGPGSPLQPPLLGPGVHEPPEEAAVDPRGGQVPGGPFSRLQPRGDGPRQPGPRPGVSGDVGSWTLALPMPFAAPPQSPTWLLYSHPVGRRARLHMGIRLSQSPLDPRSWTEPWVIYEGPSGYSDLASIGPAPEGGLVFACLYESGARTSYDEISFCTFSLREVLENVPASPKPPNLGDKPRGCCWPS

SEQ ID NO: 11 - protein, 496 aa, Homo sapiens
MMSSAAFPRWLSMGVPRTPSRTVLFERERTGLTYRVPSLLPVPPGPTLLAFVEQRLSPDDSHAHRLVLRRGTLAGGSVRWGALHVLGTAALAEHRSMNPCPVHDAGTGTVFLFFIAVLGHTPEAVQIATGRNAARLCCVASRDAGLSWGSARDLTEEAIGGAVQDWATFAVGPGHGVQLPSGRLLVPAYTYRVDRRECFGKICRTSPHSFAFYSDDHGRTWRCGGLVPNLRSGECQLAAVDGGQAGSFLYCNARSPLGSRVQALSTDEGTSFLPAERVASLPETAWGCQGSIVGFPAPAPNRPRDDSWSVGPGSPLQPPLLGPGVHEPPEEAAVDPRGGQVPGGPFSRLQPRGDGPRQPGPRPGVSGDVGSWTLALPMPFAAPPQSPTWLLYSHPVGRRARLHMGIRLSQSPLDPRSWTEPWVIYEGPSGYSDLASIGPAPEGGLVFACLYESGARTSYDEISFCTFSLREVLENVPASPKPPNLGDKPRGCCWPS

SEQ ID NO: 12 - protein, 5 aa, Homo sapiens
MASLP

SEQ ID NO: 13 - protein, 4 aa, Homo sapiens
ASLP

SEQ ID NO: 14 - protein, 8 aa, Salmonella typhimurium
TVEKSVVF

SEQ ID NO: 15 - protein, 12 aa, Homo sapiens
GDYDAPTHQVQW

SEQ ID NO: 16 - protein, 8 aa, Homo sapiens
SMDQGSTW

SEQ ID NO: 17 - protein, 8 aa, Salmonella typhimurium
STDGGKTW

SEQ ID NO: 18 - protein, 8 aa, Homo sapiens
PRPPAPEA

SEQ ID NO: 19 - protein, 8 aa, Homo sapiens
QTPLEAAC

SEQ ID NO: 20 - protein, 9 aa, Homo sapiens
NPRPPAPEA

SEQ ID NO: 21 - protein, 7 aa, Unknown
  Description of Unknown: recombinant mutant human sialidase sequence
SQNDGES

SEQ ID NO: 22 - protein, 7 aa, Unknown
  Description of Unknown: recombinant mutant human sialidase sequence
LSHSLST

SEQ ID NO: 23 - DNA, 1092 bp, Homo sapiens
gagaacgactttggactggtgcagcctctggtcaccatggaacagctgctgtgggtttccggcagacagatcggcagcgtggacaccttcagaatccctctgatcaccgccacacctagaggcaccctgctggcctttgccgaggccagaaagatgagcagctctgacgagggcgccaagtttattgccctgaggcggtctatggaccagggctctacatggtcccctaccgccttcatcgtgaacgatggcgacgtgcccgatggcctgaatctgggagctgtggtgtccgatgtggaaaccggcgtggtgttcctgttctacagcctgtgtgcccacaaggccggttgtcaggtggccagcacaatgctcgtgtggtccaaggacgacggcgtgtcctggtctacccctagaaacctgagcctggacatcggcaccgaagtgtttgctccaggacctggctctggcatccagaagcagagagagcccagaaagggcagactgatcgtgtgtggccacggcacccttgagagagatggcgttttctgcctgctgagcgacgatcatggcgcctcttggagatacggcagcggagtgtctggaatcccttacggccagcctaagcaagagaacgatttcaaccccgacgagtgccagccttacgagctgcctgatggcagcgtcgtgatcaacgcccggaaccagaacaactaccactgccactgccggatcgtgctgagaagctacgacgcctgcgataccctgcggcctagagatgtgaccttcgatcctgagctggtggaccctgttgttgccgctggtgccgtcgtgacatctagcggcatcgtgttcttcagcaaccctgctcaccccgagttcagagtgaatctgaccctgcggtggtccttcagcaatggcacaagctggcggaaagaaaccgtgcagctttggcctggacctagcggctactcttctctggctacactggaaggcagcatggacggcgaagaacaggcccctcagctgtacgtgctgtacgagaagggcagaaaccactacaccgagagcatcagcgtggccaagatcagcgtt

SEQ ID NO: 24 - DNA, 1140 bp, Homo sapiens
atggccagcctgcctgtgctgcagaaagaaagcgtgttccagtctggcgcccacgcctacagaattcccgctctgctgtatctgccaggccagcagtctctgctggctttcgctgaacagcgggccagcaagaaggatgagcacgccgaactgatcgtgctgcggagaggcgattacgacgcccctacacatcaggtgcagtggcaggctcaagaggtggtggctcaggctagactggacggccacagatctatgaacccctgtcctctgtacgatgcccagaccggcacactgtttctgttctttatcgctatccccggccaagtgaccgagcagcagcagctgcagacaagagccaacgtgaccagactgtgtcaagtgacctccaccgaccacggcagaacctggtctagccctagagatctgaccgacgccgccatcggacctgcctatagagagtggtccaccttcgccgttggacctggacactgtctccagctgcacgacagggctagatctctggtggtgcctgcctacgcctatagaaagctgcaccccatccagcggcctattcctagcgccttctgctttctgagccacgatcacggcaggacatgggccagaggacatttcgtggcccaggacacactggaatgccaggtggccgaagtggaaaccggcgagcagagagtcgtgaccctgaacgccagatctcacctgagagccagagtgcaggcccagagcacaaacgacggcctggatttccaagagagccagctggtcaagaaactggtggaacctcctccacagggctgtcagggaagcgtgatcagctttccatctcctagaagcggccctggctctcctgctcagtggctgctgtatacacaccccacacacagctggcagagagccgatctgggcgcctacctgaatcctagacctcctgctcctgaggcttggagcgaacctgttctgctggccaagggcagctgtgcctacagcgatctgcagtctatgggcacaggccctgatggcagccctctgtttggctgtctgtacgaggccaacgactacgaagagatcgtgttcctgatgttcaccctgaagcaggcctttccagccgagtacctgcctcaa

SEQ ID NO: 25 - DNA, 1284 bp, Homo sapiens
atggaggaagtgaccacctgtagcttcaacagccctctgttccggcaagaggacgaccggggcatcacctacagaatccctgctctgctgtacatccctcctacacacacctttctggccttcgccgagaagcggagcaccagacgagatgaagatgccctgcacctggtgctgagaagaggcctgagaatcggacagctggtgcagtggggacctctgaagcctctgatggaagccacactgcccggccacagaaccatgaatccttgtcctgtgtgggagcagaaaagcggctgcgtgttcctgttcttcatctgcgtgcggggccacgtgaccgagagacagcaaatcgtgtccggcagaaacgccgccagactgtgcttcatctacagccaggatgccggctgctcttggagcgaagttcgggatctgaccgaagaagtgatcggcagcgagctgaagcactgggccacatttgctgttggccctggccacggaatccagctgcaatctggcagactggtcatccccgcctacacctactatatccccagctggttcttctgcttccaactgccttgcaagacccggcctcacagcctgatgatctacagcgacgatctgggcgtgacatggcaccacggcagactgatcagacccatggtcaccgtggaatgcgaggtggccgaagtgacaggcagagctggacaccctgtgctgtactgctctgccagaacacccaaccggtgtagagccgaggctctgtctacagatcacggcgagggctttcagagactggccctctctagacagctgtgcgaacctcctcatggctgtcagggcagcgtggtgtccttcagacctctggaaatccctcaccggtgccaggacagcagctctaaggatgcccctaccatccagcagtctagccctggcagcagcctgagactggaagaggaagccggaacacctagcgagagctggctgctgtactctcaccccaccagcagaaagcagagagtggacctgggcatctacctgaatcagacccctctggaagccgcctgttggagcagaccttggattctgcactgtggcccttgcggctactctgatctggccgctctggaagaagagggcctgttcggctgcctgtttgagtgcggcacaaagcaagagtgcgagcagatcgccttccggctgttcacccacagagagatcctgagccatctgcagggcgactgcacaagcccaggcagaaatcccagccagttcaagagcaac

SEQ ID NO: 26 - DNA, 1452 bp, Homo sapiens
atgggcgtgcccagaacacccagcagaaccgtgctgttcgagagagagaggaccggcctgacctacagagtgccttctctgctgcctgtgcctcctggacctacactgctggccttcgtggaacagagactgagccccgatgattctcacgcccacagactggtgctgagaagaggaacactggctggcggctctgttagatggggagcactgcatgtgctgggcacagctgctcttgccgagcacagatccatgaatccctgtcctgtgcacgacgccggaaccggcacagtgtttctgttctttatcgccgtgctgggccacacacctgaggccgttcaaattgccaccggcagaaatgccgccagactgtgttgtgtggcctccagagatgccggcctgtcttggggatctgccagagatctgaccgaggaagccattggcggagccgttcaggattgggccacatttgctgttggacctggacacggcgtgcagctgccaagtggtagactgctggtgcctgcctacacatacagagtggatcggagagagtgcttcggaaagatctgccggacaagccctcacagcttcgccttctactccgacgatcacggccggacttggagatgtggtggcctggtgcctaatctgagaagcggcgaatgtcaactggccgccgttgatggtggacaggctggcagcttcctgtactgcaacgccagatctcctctgggctctagagtgcaggccctgtctaccgatgagggcaccagttttctgcccgccgaaagagttgcctctctgcctgaaacagcctggggctgtcagggctctatcgtgggatttcctgctcctgctccaaacagaccccgggacgattcttggagtgtcggccctggatctccactgcagcctccattgcttggaccaggcgttcacgagccacctgaagaggctgccgttgatcctagaggcggacaagttcctggcggcccttttagcagactgcagccaagaggcgacggccctagacaacctggaccaagacctggcgtcagcggagatgttggctcttggacactggccctgcctatgccttttgccgctcctcctcagtctcctacctggctgctgtactctcaccctgttggcagacgggccagactgcacatgggcatcagactgtctcagagccctctggaccccagaagctggacagagccttgggtcatctatgagggccctagcggctacagcgatctggcctctattggcccagctcctgaaggcggactggtgttcgcttgtctgtatgagagcggcgccagaaccagctacgacgagatcagcttctgcaccttcagcctgcgcgaggtgctggaaaatgtgcccgcctctcctaagcctcctaacctgggcgataagcctagaggctgttgctggccatct

SEQ ID NO: 27 - protein, 47 aa, Homo sapiens
MTGERPSTALPDRRWGPRILGFWGGCRVWVFAAIFLLLSLAASWSKA

SEQ ID NO: 28 - protein, 22 aa, Unknown
  Description of Unknown: recombinant mutant human sialidase sequence
MDMRVPAQLLGLLLLWLPGARC

SEQ ID NO: 29 - protein, 4 aa, Homo sapiens
YGTL

SEQ ID NO: 30 - protein, 382 aa, Salmonella typhimurium
MTVEKSVVFKAEGEHFTDQKGNTIVGSGSGGTTKYFRIPAMCTTSKGTIVVFADARHNTASDQSFIDTAAARSTDGGKTWNKKIAIYNDRVNSKLSRVMDPTCIVANIQGRETILVMVGKWNNNDKTWGAYRDKAPDTDWDLVLYKSTDDGVTFSKVETNIHDIVTKNGTISAMLGGVGSGLQLNDGKLVFPVQMVRTKNITTVLNTSFIYSTDGITWSLPSGYCEGFGSENNIIEFNASLVNNIRNSGLRRSFETKDFGKTWTEFPPMDKKVDNRNHGVQGSTITIPSGNKLVAAHSSAQNKNNDYTRSDISLYAHNLYSGEVKLIDDFYPKVGNASGAGYSCLSYRKNVDKETLYVVYEANGSIEFQDLSRHLPVIKSYN

SEQ ID NO: 31 - protein, 232 aa, Artificial Sequence
  Description of Artificial Sequence: Synthetic polypeptide
EPKSCDKTHTCPPCPAPELLGGPSVFLFPPKPKDTLMISRTPEVTCVVVDVSHEDPEVKFNWYVDGVEVHNAKTKPREEQYNSTYRVVSVLTVLHQDWLNGKEYKCKVSNKALPAPIEKTISKAKGQPREPQVYTLPPSREEMTKNQVSLTCLVKGFYPSDIAVEWESNGQPENNYKTTPPVLDSDGSFFLYSKLTVDKSRWQQGNVFSCSVMHEALHNHYTQKSLSLSPGK

SEQ ID NO: 32 - protein, 227 aa, Artificial Sequence
  Description of Artificial Sequence: Synthetic polypeptide
DKTHTCPPCPAPELLGGPSVFLFPPKPKDTLMISRTPEVTCVVVDVSHEDPEVKFNWYVDGVEVHNAKTKPREEQYNSTYRVVSVLTVLHQDWLNGKEYKCKVSNKALPAPIEKTISKAKGQPREPQVYTLPPSREEMTKNQVSLTCLVKGFYPSDIAVEWESNGQPENNYKTTPPVLDSDGSFFLTSKLTVDKSRWQQGNVFSCSVMHEALHNHYTQKSLSLSPGK

SEQ ID NO: 33 - protein, 232 aa, Artificial Sequence
  Description of Artificial Sequence: Synthetic polypeptide
EPKSCDKTHTCPPCPAPELLGGPSVFLFPPKPKDTLMISRTPEVTCVVVDVSHEDPEVKFNWYVDGVEVHNAKTKPREEQYNSTYRVVSVLTVLHQDWLNGKEYKCKVSNKALPAPIEKTISKAKGQPREPQVYTLPPSREEMTKNQVSLYCLVKGFYPSDIAVEWESNGQPENNYKTTPPVLDSDGSFFLYSKLTVDKSRWQQGNVFSCSVMHEALHNHYTQKSLSLSPGK

SEQ ID NO: 34 - DNA, 1383 bp, Homo sapiens
atgagacctgcggacctgcccccgcgccccatggaagaatccccggcgtccagctctgccccgacagagacggaggagccggggtccagtgcagaggtcatggaagaagtgacaacatgctccttcaacagccctctgttccggcaggaagatgacagagggattacctaccggatcccagccctgctctacataccccccacccacaccttcctggcctttgcagagaagcgttctacgaggagagatgaggatgctctccacctggtgctgaggcgagggttgaggattgggcagttggtacagtgggggcccctgaagccactgatggaagccacactaccggggcatcggaccatgaacccctgtcctgtatgggagcagaagagtggttgtgtgttcctgttcttcatctgtgtgcggggccatgtcacagagcgtcaacagattgtgtcaggcaggaatgctgcccgcctttgcttcatctacagtcaggatgctggatgttcatggagtgaggtgagggacttgactgaggaggtcattggctcagagctgaagcactgggccacatttgctgtgggcccaggtcatggcatccagctgcagtcagggagactggtcatccctgcgtatacctactacatcccttcctggttcttttgcttccagctaccatgtaaaaccaggcctcattctctgatgatctacagtgatgacctaggggtcacatggcaccatggtagactcattaggcccatggttacagtagaatgtgaagtggcagaggtgactgggagggctggccaccctgtgctatattgcagtgcccggacaccaaacaggtgccgggcagaggcgctcagcactgaccatggtgaaggctttcagagactggccctgagtcgacagctctgtgagcccccacatggttgccaagggagtgtggtaagtttccggcccctggagatcccacataggtgccaggactctagcagcaaagatgcacccaccattcagcagagctctccaggcagttcactgaggctggaggaggaagctggaacaccgtcagaatcatggctcttgtactcacacccaaccagtaggaaacagagggttgacctaggtatctatctcaaccagacccccttggaggctgcctgctggtcccgcccctggatcttgcactgtgggccctgtggctactctgatctggctgctctggaggaggagggcttgtttgggtgtttgtttgaatgtgggaccaagcaagagtgtgagcagattgccttccgcctgtttacacaccgggagatcctgagtcacctgcagggggactgcaccagccctggtaggaacccaagccaattcaaaagcaat

SEQ ID NO: 35 - DNA, 1488 bp, Homo sapiens
atgatgagctctgcagccttcccaaggtggctgagcatgggggtccctcgtaccccttcacggacagtgctcttcgagcgggagaggacgggcctgacctaccgcgtgccctcgctgctccccgtgccccccgggcccaccctgctggcctttgtggagcagcggctcagccctgacgactcccacgcccaccgcctggtgctgaggaggggcacgctggccgggggctccgtgcggtggggtgccctgcacgtgctggggacagcagccctggcggagcaccggtccatgaacccctgccctgtgcacgatgctggcacgggcaccgtcttcctcttcttcatcgcggtgctgggccacacgcctgaggccgtgcagatcgccacgggaaggaacgccgcgcgcctctgctgtgtggccagccgtgacgccggcctctcgtggggcagcgcccgggacctcaccgaggaggccatcggtggtgccgtgcaggactgggccacattcgctgtgggtcccggccacggtgtgcagctgccctcaggccgcctgctggtacccgcctacacctaccgcgtggaccgccgagagtgttttggcaagatctgccggaccagccctcactccttcgccttctacagcgatgaccacggccgcacctggcgctgtggaggcctcgtgcccaacctgcgctcaggcgagtgccagctggcagcggtggacggtgggcaggccggcagcttcctctactgcaatgcccggagcccactgggcagccgtgtgcaggcgctcagcactgacgagggcacctccttcctgcccgcagagcgcgtggcttccctgcccgagactgcctggggctgccagggcagcatcgtgggcttcccagcccccgcccccaacaggccacgggatgacagttggtcagtgggccccgggagtcccctccagcctccactcctcggtcctggagtccacgaacccccagaggaggctgctgtagacccccgtggaggccaggtgcctggtgggcccttcagccgtctgcagcctcggggggatggccccaggcagcctggccccaggcctggggtcagtggggatgtggggtcctggaccctggcactccccatgccctttgctgccccgccccagagccccacgtggctgctgtactcccacccagtggggcgcagggctcggctacacatgggtatccgcctgagccagtccccgctggacccgcgcagctggacagagccctgggtgatctacgagggccccagcggctactccgacctggcgtccatcgggccggcccctgaggggggcctggtttttgcctgcctgtacgagagcggggccaggacctcctatgatgagatttccttttgtacattctccctgcgtgaggtcctggagaacgtgcccgccagccccaaaccgcccaaccttggggacaagcctcgggggtgctgctggccctcc

SEQ ID NO: 36 - protein, 781 aa, Vibrio cholera
MRFKNVKKTALMLAMFGMATSSNAALFDYNATGDTEFDSPAKQGWMQDNTNNGSGVLTNADGMPAWLVQGIGGRAQWTYSLSTNQHAQASSFGWRMTTEMKVLSGGMITNYYANGTQRVLPIISLDSSGNLVVEFEGQTGRTVLATGTAATEYHKFELVFLPGSNPSASFYFDGKLIRDNIQPTASKQNMIVWGNGSSNTDGVAAYRDIKFEIQGDVIFRGPDRIPSIVASSVTPGVVTAFAEKRVGGGDPGALSNTNDIITRTSRDGGITWDTELNLTEQINVSDEFDFSDPRPIYDPSSNTVLVSYARWPTDAAQNGDRIKPWMPNGIFYSVYDVASGNWQAPIDVTDQVKERSFQIAGWGGSELYRRNTSLNSQQDWQSNAKIRIVDGAANQIQVADGSRKYVVTLSIDESGGLVANLNGVSAPIILQSEHAKVHSFHDYELQYSALNHTTTLFVDGQQITTWAGEVSQENNIQFGNADAQIDGRLHVQKIVLTQQGHNLVEFDAFYLAQQTPEVEKDLEKLGWTKIKTGNTMSLYGNASVNPGPGHGITLTRQQNISGSQNGRLIYPAIVLDRFFLNVMSIYSDDGGSNWQTGSTLPIPFRWKSSSILETLEPSEADMVELQNGDLLLTARLDFNQIVNGVNYSPRQQFLSKDGGITWSLLEANNANVFSNISTGTVDASITRFEQSDGSHFLLFTNPQGNPAGTNGRQNLGLWFSFDEGVTWKGPIQLVNGASAYSDIYQLDSENAIVIVETDNSNMRILRMPITLLKQKLTLSQN

SEQ ID NO: 37 - DNA, 2424 bp, Vibrio cholera
ttgtcaatcaagatgacttcacaacgaagaagagcatcgattcacaaggaaacagattctaatataaagggagtagatatgcgtttcaaaaacgtaaagaaaaccgctttaatgcttgcaatgttcggtatggcgacaagctcaaacgccgcactttttgactataacgcaacgggtgacactgagtttgacagtccagccaaacagggatggatgcaagacaacacgaataatggcagcggcgttttaaccaatgcagatggaatgcccgcttggttggtgcaaggtattggagggagagctcaatggacatattctctctctactaatcaacatgcccaagcatcaagtttcggttggcgaatgacgacagaaatgaaagtgctcagtggtggaatgatcacaaactactacgccaacggcactcagcgtgtcttacccatcatttcattagatagcagtggtaacttagttgttgagtttgaagggcaaactggacgcaccgttttggcaaccggcacagcagcaacggaatatcataaatttgaattggtattccttcctggaagtaacccatccgctagcttttacttcgatggcaaactcattcgtgacaacatccagccgactgcatcaaaacaaaatatgatcgtatgggggaatggctcatcaaatacggatggtgtcgccgcttatcgtgatattaagtttgaaattcaaggcgacgtcatcttcagaggcccagaccgtataccgtccattgtagcaagtagcgtaacaccaggggtggtaaccgcatttgcagagaaacgtgtggggggaggagatcccggtgctctgagtaataccaatgacataatcactcgtacctcacgagatggcggtataacttgggataccgagctcaacctcactgagcaaatcaatgtcagtgatgagtttgatttctccgatcctcggcctatctatgatccttcctccaatacggttcttgtctcttatgctcgatggccgaccgatgccgctcaaaacggagatcgaataaaaccatggatgccaaacggtattttttacagcgtctatgatgttgcatcagggaactggcaagcgcctatcgatgttaccgatcaggtgaaagaacgcagtttccaaatcgctggttggggtggttcagagctgtatcgccgaaataccagcctaaatagccagcaagactggcaatcaaacgctaagatccgaattgttgatggtgcagcgaaccagatacaagttgccgatggtagccgaaaatatgttgtcacactgagtattgatgaatcaggtggtctagtcgctaatctaaacggtgttagtgctccgattatcctgcaatctgaacacgcaaaggtacactctttccatgactacgaacttcaatattcggcgttaaaccacaccacaacgttattcgtggatggtcagcaaatcacaacttgggctggcgaagtatcgcaggagaacaacattcagtttggtaatgcggatgcccaaattgacggcagactgcatgtgcaaaaaattgttctcacacagcaaggccataacctcgtggagtttgatgctttctatttagcacagcaaacccctgaagtagagaaagaccttgaaaagcttggttggacaaaaattaaaacgggcaacaccatgagtttgtatggaaatgccagtgtcaacccaggaccgggtcatggcatcacccttactcgacaacaaaatatcagtggcagccaaaacggccgcttgatctacccagcgattgtgcttgatcgtttcttcttgaacgtcatgtctatttacagtgatgatggcggttcaaactggcaaaccggttcaacactccctatcccctttcgctggaagagttcgagtatcctagaaactctcgaacctagtgaagctgatatggttgaactccaaaacggtgatctactccttactgcacgccttgattttaaccaaatcgttaatggtgtgaactatagcccacgccagcaatttttgagtaaagatggtggaatcacgtggagcctacttgaggctaacaacgctaacgtctttagcaatatcagtactggtaccgttgatgcttctattactcggttcgagcaaagtgacggtagccatttcttactctttactaacccacaaggaaaccctgcggggacaaatggcaggcaaaatctaggcttatggtttagcttcgatgaaggggtgacatggaaaggaccaattcaacttgttaatggtgcatcggcatattctgatatttatcaattggattcggaaaatgcgattgtcattgttgaaacggataattcaaatatgcgaattcttcgtatgcctatcacattgctaaaacagaagctgaccttatcgcaaaactaa

SEQ ID NO: 38 - protein, 409 aa, Mus musculus
MVGADPTRPRGPLSYWAGRRGQGLAAIFLLLVSAAESEARAEDDFSLVQPLVTMEQLLWVSGKQIGSVDTFRIPLITATPRGTLLAFAEARKKSASDEGAKFIAMRRSTDQGSTWSSTAFIVDDGEASDGLNLGAVVNDVDTGIVFLIYTLCAHKVNCQVASTMLVWSKDDGISWSPPRNLSVDIGTEMFAPGPGSGIQKQREPGKGRLIVCGHGTLERDGVFCLLSDDHGASWHYGTGVSGIPFGQPKHDHDFNPDECQPYELPDGSVIINARNQNNYHCRCRIVLRSYDACDTLRPRDVTFDPELVDPVVAAGALATSSGIVFFSNPAHPEFRVNLTLRWSFSNGTSWLKERVQVWPGPSGYSSLTALENSTDGKKQPPQLFVLYEKGLNRYTESISMVKISVYGTL

SEQ ID NO: 39 - protein, 393 aa, Mus musculus
MTVQPSPWFSDLRPMATCPVLQKETLFRTGVHAYRIPALLYLKKQKTLLAFAEKRASKTDEHAELIVLRRGSYNEATNRVKWQPEEVVTQAQLEGHRSMNPCPLYDKQTKTLFLFFIAVPGRVSEHHQLHTKVNVTRLCCVSSTDHGRTWSPIQDLTETTIGSTHQEWATFAVGPGHCLQLRNPAGSLLVPAYAYRKLHPAQKPTPFAFCFISLDHGHTWKLGNFVAENSLECQVAEVGTGAQRMVYLNARSFLGARVQAQSPNDGLDFQDNRVVSKLVEPPHGCHGSVVAFHNPISKPHALDTWLLYTHPTDSRNRTNLGVYLNQMPLDPTAWSEPTLLAMGICAYSDLQNMGQGPDGSPQFGCLYESGNYEEIIFLIFTLKQAFPTVFDAQ

SEQ ID NO: 40 - protein, 418 aa, Mus musculus
MEEVPPYSLSSTLFQQEEQSGVTYRIPALLYLPPTHTFLAFAEKRTSVRDEDAACLVLRRGLMKGRSVQWGPQRLLMEATLPGHRTMNPCPVWEKNTGRVYLFFICVRGHVTERCQIVWGKNAARLCFLCSEDAGCSWGEVKDLTEEVIGSEVKRWATFAVGPGHGIQLHSGRLIIPAYAYYVSRWFLCFACSVKPHSLMIYSDDFGVTWHHGKFIEPQVTGECQVAEVAGTAGNPVLYCSARTPSRFRAEAFSTDSGGCFQKPTLNPQLHEPRTGCQGSVVSFRPLKMPNTYQDSIGKGAPATQKCPLLDSPLEVEKGAETPSATWLLYSHPTSKRKRINLGIYYNRNPLEVNCWSRPWILNRGPSGYSDLAVVEEQDLVACLFECGEKNEYERIDFCLFSDHEVLSCEDCTSPSSD

SEQ ID NO: 41 - protein, 501 aa, Mus musculus
METAGAPFCFHVDSLVPCSYWKVMGPTRVPRRTVLFQRERTGLTYRVPALLCVPPRPTLLAFAEQRLSPDDSHAHRLVLRRGTLTRGSVRWGTLSVLETAVLEEHRSMNPCPVLDEHSGTIFLFFIAVLGHTPEAVQIATGKNAARLCCVTSCDAGLTWGSVRDLTEEAIGAALQDWATFAVGPGHGVQLRSGRLLVPAYTYHVDRRECFGKICWTSPHSLAFYSDDHGISWHCGGLVPNLRSGECQLAAVDGDFLYCNARSPLGNRVQALSADEGTSFLPGELVPTLAETARGCQGSIVGFLAPPSIEPQDDRWTGSPRNTPHSPCFNLRVQESSGEGARGLLERWMPRLPLCYPQSRSPENHGLEPGSDGDKTSWTPECPMSSDSMLQSPTWLLYSHPAGRRARLHMGIYLSRSPLDPHSWTEPWVIYEGPSGYSDLAFLGPMPGASLVFACLFESGTRTSYEDISFCLFSLADVLENVPTGLEMLSLRDKAQGHCWPS

SEQ ID NO: 42 - DNA, 3850 bp, Mus musculus
gggtcacatgctgatggactaattggagtcgcggcagcgcgggctgcggcccccaaggggaggggtcggagtgacgtgcgcgcttttaaagggccgaggtcagctgacggcttgccaccggtgaccagttcctggacagggatcgccgggagctatggtgggggcagacccgaccagaccccggggaccgctgagctattgggcgggccgtcggggtcaggggctcgcagcgatcttcctgctcctggtgtccgcggcggaatccgaggccagggcagaggatgacttcagcctggtgcagccgctggtgaccatggagcagctgctgtgggtgagcgggaagcagatcggctctgtagacactttccgcatcccgctcatcacagccacccctcggggcacgctcctggccttcgctgaggccaggaaaaaatctgcatccgatgagggggccaagttcatcgccatgaggaggtccacggaccagggtagcacgtggtcctctacagccttcatcgtagacgatggggaggcctccgatggcctgaacctgggcgctgtggtgaacgatgtagacacagggatagtgttccttatctataccctctgtgctcacaaggtcaactgccaggtggcctctaccatgttggtttggagtaaggacgacggcatttcctggagcccaccccggaatctctctgtggatattggcacagagatgtttgcccctggacctggctcaggcattcagaaacagcgggagcctgggaagggccggctcattgtgtgtggacacgggacgctggagcgagatggggtcttctgtctcctcagtgatgaccacggtgcctcctggcactacggcactggagtgagcggcattccctttggccagcccaaacacgatcacgatttcaaccccgacgagtgccagccctacgagcttccagatggctcggtcatcatcaacgcccggaaccagaataactaccattgccgctgcaggatcgtcctccgcagctatgacgcctgtgacaccctcaggccccgggatgtgaccttcgaccctgagctcgtggaccctgtggtagctgcaggagcactagccaccagctccggcattgtcttcttctccaatccagcccaccctgagttccgagtgaacctgaccctgcgctggagtttcagcaatggtacatcctggcagaaggagagggtccaggtgtggccgggacccagcggctactcgtccctgacagccctggaaaacagcacggatggaaagaagcagcccccgcagctgttcgttctgtacgagaaaggcctgaaccggtacaccgagagcatctccatggtcaaaatcagcgtctacggcacgctctgagccccgtgcccaaaggacaccaagtcctggtcgctgacttcacagctctctggaccatctgcagagggtgcctgaaacacagctcttcctctgaactctgaccttttgcaacttctcatcaacagggaagtctcttcgttatgacttaacacccagcttcctctcggggcaggaagtccctccgtcaccaagagcacttttttccagtatgctggggatggcccctgtccattctcttccaggacaacggagctgtgcctttctgggacaggatgggggaggggctccccctggagagatgaacagatacgaactcagggaactgagaaggcccggtgtcctagggtacaaaggcaggtactagatgtgattgctgaaagtccccagggcagagtgtcctttcagagcaaggataagcacacctacgtgtgcacctttgattatttatgaatcgaaatatttgtaacttaaaatttttgatgcagaaaaagcgtttgtggagtctgtggttctgtctgctcacgccttcccaattgcctcctggagagacaggaaggcagctggaagaggagccgatgtacttactgggaagcagaaacccctagattccatcctggctgctgctgtttgcaagtgtcaaagatgggggggcgtgtttatattttatatttctaagatggggtggcataggaaatagggaacagatgtgtaaaaccagatgggaaggacagtctgtgagaaaggagcaagcagttgctgcaggtgtgggagagcaaagcccttctccacgtggaaagagcccagatggacgctaagcatgttgggcacctgtaaccccgcactcgctggactgacggtgtagctcagtggtggagctagtacttggaacgcctaagactctgggttcagtccttgggggggggggtatgtgtttattgagaggaaggtgtacgtactgtaggtcagaggacagcttactggagttgtctctctccttcacgctgtgagtcctgtggaatgacctcaggtgtcagagttgggggcaggtgcctttgccagctgagccatcttgctgtctctgctttaatttaaaaaaaaaaaaaaaaaagaatattaaggtctgagggattcgggctgcgttcatttcaattagagggtcatatttcttttgacatttcttctctaagaaatgttaagatcatttgttctgtgtgatagaggtatagctccattgtatgtcagcagtgagggatcctgtgcattttatccagagtttgtacggtgttctaggggctgctagtgcagcccagtgctaaacacttcagcatgcacaaggcctcaatcagtgcatgcatgtgcacacacacacagacacacacgtacacactgacacaggtacacaaatacacactggcccacatgtacacatcgactcacaggtacacagacccactttgacacacatatacacagacacaaacgcactggcacacacatatacacaggcacacatggatagatggacacacgtgtacacatacacacacacacagaaatacaaatgttcaggttttctaaaaaaaaaaaaattagagacgtgttgacttcatttttagcaaaaatcctgtcatgtatcttaaagtggattgaacccactatgtagcccaggctggcctccaaatgggcatccttctgcctcagtctcccgagggctaggataacaggagtatgccatcacacctggctaatagaaattttcaaaattgtttgtttgaaggtgactcttactatattgcctaactgatctccagttcgtgaaatcctcctgcctcagaaccaggactgtcaatataacccaccaagacaggccaacattcacaattgattgttagtttgtggtctgaatcaaggtcttatactgtagcccaggctagcccggaatacacgatatctccagtgcttcagatcctcagttctaactaagcatggccacatccatgtttaactgcaaatttgatgttaccatggtttggtttggtttggtttggtttggtttggtttggtttggttttttggccattttttttttctcatgctgaggccttgtgctctcaagttggggagacagcatggagggtagctgcaactgtaaccccagttccaggggacctgacaccctctggcctccacaagtattaggcacatctgtggtgcacagacatacaatcaggcaaaatattcatacacataaaataaaataatttaaaacaaaagcaaaaatcaggacctaagaaaaaaatctattcctgattcttttatgttttgtttgtattttatcaagacagggttgtttctctgtatagccctggctgtcttggaattcactctgtagaccaggctggcctcaaactcagaaatcctcctgcctttgccttccaagtgctggaattaaaggcatgcgccacc

SEQ ID NO: 43 - DNA, 1722 bp, Mus musculus
gacatgacccaaacggcccctggctgcaaggtaatatcggaagttgactaagaatggacgccccaccactgactgacccgccccctgagtctgagattggacttgtctctggatacagtcatactttgaggtactacaagttagaaactgttaggttactcagttcagtccatgacagtccaaccttctccatggttttccgatctcaggcccatggcgacctgccctgtcctgcagaaggagacactgttccgcacaggcgtccatgcttacagaatccctgctctgctctacctgaagaagcagaagaccctgctggcctttgcggaaaagcgagccagcaagacggatgagcacgcagagttgattgtcctgagaagaggaagctacaacgaagccaccaaccgtgtcaagtggcagcctgaggaagtggtgacccaagcccagctggaaggccaccgctccatgaatccatgtcccttgtatgacaagcaaacaaagaccctcttccttttcttcatcgctgtccctgggcgtgtatcagaacatcatcagctccacactaaggttaatgtcacacggctgtgctgtgtcagcagcactgaccatgggaggacctggagccccatccaggacctcacagagaccaccattggcagcactcatcaggaatgggccacatttgctgtgggtcctgggcattgtctgcagctgcggaacccagctgggagcctgctggtacctgcttatgcctaccggaaactgcaccctgctcagaagcctaccccctttgccttctgcttcatcagccttgaccatgggcacacatggaaactaggcaactttgtggctgaaaactcactggagtgccaggtggctgaggttggcactggagctcagaggatggtatatctcaatgctaggagcttcctgggagccagggtccaggcacaaagtcctaatgatggtctggatttccaggacaaccgggtagtgagtaagcttgtagagcccccccacgggtgtcatggaagtgtggttgccttccacaaccccatctctaagccacatgccttagacacatggcttctttatacacaccctacagactccaggaatagaaccaacctgggtgtgtacctaaaccagatgccactagatcccacagcctggtcagagcccaccctgctggccatgggcatctgtgcctactcagacttacagaacatggggcaaggccctgatggctccccacagtttgggtgtctgtatgaatcaggtaactatgaagagatcattttcctcatattcaccctgaagcaagctttccccactgtatttgatgcccagtgatctcagtgcacgtggcccaaagggcttccttgtgcttcaaaacacccatctctctttgcttccagcatcctctggactcttgagtccagctcttgggtaacttcctcaggaggatgcagagaatttggtctcttgactctctgcaggccttattgtttcagcctctggttctcttttcagcccagaaatcaaaggagcctggctttcctcagcctgttggcagggcaggtggggacagtatatatagaggctgccattctgcatgtcggttgtcactatgctagtttaacctgcctgtttccccatgcctagtgtttgaatgagtattaataaaatatccaacccagcccatttcttcctggaaaaaaa

SEQ ID NO: 44 - DNA, 3340 bp, Mus musculus
actgcgcggtgaaggggcgtggcctggccggggaggttgacacccagacgctgctctcagtcctctggcgcctgctccccagcgcattccttctgctcctgggatatttgtctcattactgccagttcttgcgcagcggtcactgggttcgtttcagcgtctgtggtttctgtcgctgttatccagtctccatcgccccagctcagcttcaggccttcttccgagactccacgggagagcccagagagcctccggagccgaagccatggaggaagtcccaccctactccctcagcagcaccctgttccagcaggaagaacagagtggggtgacctaccggatcccagccctgctgtaccttcctcccacccacaccttcctggcctttgcagagaagcggacctcagtcagagatgaggatgctgcctgcctggtgctcagacgagggctgatgaaggggcgctctgtacagtggggcccccaacggctactgatggaggccacattacctgggcatcgcaccatgaacccctgccctgtgtgggagaaaaatactggccgtgtgtacctgtttttcatctgtgtgcggggccatgttactgagaggtgccagattgtgtggggcaaaaatgccgcccgtctctgcttcctttgcagtgaagatgccggctgctcttggggtgaagtgaaagacttgaccgaggaggtcattggctcagaggtgaagcgctgggccacatttgctgtgggcccaggtcatggcatccagctacactcgggaaggctgatcatccccgcctatgcctactatgtctcacgttggtttctctgctttgcgtgttcagtcaagccccattccctgatgatctacagtgatgactttggagtcacatggcaccatggcaagttcattgagccccaggtgacaggggagtgccaagtggccgaagtggctgggacggctggtaaccctgtgctcactgcagtgcccgaacaccaagccgatttcgagcagaggcttttagtactgatagtggtggctgctttcagaagccaaccctgaacccacaactccatgagcctcgaaccggctgccaaggtagtgtagtgagcttccggcctttgaagatgccaaatacctatcaagactcaattggcaaaggtgctcccgctactcagaagtgccctctgctggacagtcctctggaggtggagaaaggagctgaaacaccatcagcaacatggctcttgtactcacatccaactagcaagaggaagaggattaacctaggcatctactacaaccggaaccccttggaggtgaactgctggtcccgcccgtggatcttgaaccgtgggcccagtggctactctgatctggctgttgtggaagaacaggacttggtggcgtgtttgtttgagtgtggggagaagaatgagtatgagcggattgacttctgtctgttttcagaccatgaggtcctgagctgtgaagactgtaccagccctagtagcgactaaagccaaatcaagacggatgagtgaggcccagcttcccacagaaaggaatggcagctacagccagggtaacagaggtctctgatgtctagagaaaactctaaaaactaataatctgctccttgaattttttcacttttcccttcaatgagcatggtgaaaattgtgccatatcttacataacgaggctcttgaactgggagtttgaatctcttctcttcccattaaaaggagaggccatgtgctcgcttcgcgttcgacaaagcctggattctgatcttgagtggaagccacaggcttgtcttttccaatggttcactgctcacctgagtattaggtgatgtgtaggtgccttggccagaagaaagatctgtgttgttgtatttttttaaatttatttatttactatatgtaagtacactgcagctgtcttcagacacaccagaagagggcgtcagatctcattagagatggttgtgagccaccatgtggttgctgggatttgaactcaggaccttcagaagagcagtcagtgctcttaactactgagccatctctcaagccccgcattgctgtatttttaataagaaaaatgcccttatccttccaataatgcctggagctgtacaaattctctgtcttagaagacttgagaaagcagaactgtaaggtcagatgctttctccagccttgatgctgtgttccaccttcccttcctcatccagaaaacagttactagggagaaaatgagaaacccatgccagctgcccttgatgatggttgataacggtgcttattgcttttgatgtcattacctctgttagagatgaatcagagtcagaggtccttagctgcatccacccatttccagggggacattctaacactgctgaacagtcagctaaaatgagagctgtgtgtcctagcctgattccaggttagtcatgatgcttcctggagctgggcttttatctaatcccaggagccatctaggggaggctcagagctagcaggtgatcttcctgagatggtttcaccgtgacaggtgaaccatgagcccttccaagcaaggccaaaggacaacattataggaaagatttctagtattaatatgccttttctctgtgtgtgtactgtcttgtagtgatgctatatagacaaatagatgatttcttattttttgtttgtttgtttgtttttttgtttttctgtagccctagctgtcctggaactcactttgtaaaccaggctggcctcgatctcagaaatccgcctgcctctgcctcccgagtgctgggattaaaggtgtgcaccaccacaccttaatgatgatcctataagtattcctaaaattatactagtaattattaactcctttataataggactgctattaaagccctcgctgatatgaaaactacagtgagaactctgccagtcttcacatgtcataattacttctgagatagaaagcaggcatttacaacttagaacacatttcttagagctgtaaaacaattaactagaggtcataaaagggaatgaaagatttattgtaggtgctaggacagaacataaaatattgactgggcttatctatatgaaacttcattgttaacttttacacaagaattatggtttttaactttcagtgaacctgcggagctagtgacagaagagaaatgtctagttagataactactcttaatggaaattcacataaacatctgttgccatcttctttttgaatttatgtttaaacttgtgaatgtttgaattagacactacgcgagcacatagaaaataaagaactaagcgtgaa

SEQ ID NO: 45 - DNA, 4608 bp, Mus musculus
ggacagtgtgcatcacggagcttgtggcccagactgtgcctggcagacccagaggacctaaggcttggctctagtggtggtcagcacagccctcggtggtctgcggagcctgatattgctttacgtaagggctgttctgctgtgcatctcctgtgtctgaagctattcgccatggagactgctggagctcccttctgcttccatgtggactccctggtaccttgctcctactggaaggttatggggcccacgcgtgttcccaggagaacggtgctcttccagagggaaaggacgggcctgacctaccgtgtgcctgcgttactctgtgtgcctcccaggcctactctgctggccttcgcggaacagcgacttagccctgatgactcccatgcccaccgcctggtgctacggaggggcacgctgaccaggggctcagtgcggtggggcactctgagtgtactggagactgcagtactggaggagcacaggtctatgaacccttgcccggtgctggatgagcactctggtaccatcttcctcttcttcattgccgtgctgggccacacaccggaggccgtgcaaatcgccactggcaagaacgctgctcgcctctgctgtgtgaccagctgtgacgctggcctcacctggggcagtgttcgagatctcactgaggaagccattggtgctgcattgcaggactgggccacctttgctgtgggtccgggccatggagttcagctgcgctcgggtcgcctgcttgttcctgcttacacctatcatgtggaccgacgggaatgttttggcaagatctgctggaccagtccccactccttggcattctacagtgatgatcatgggatctcctggcattgtggaggccttgtgcccaacctacgctctggagagtgccaactggctgcggtagatggagactttctctactgtaatgctcgaagccctctgggtaaccgtgtgcaggcactgagtgctgatgaaggcacgtccttcctaccaggggagctggtgcctacattggcagagacggctcgtggttgccagggtagcattgtgggcttcctagctccaccctcaatcgagcctcaggatgaccggtggacagggagtcctaggaacaccccacattccccatgcttcaatctcagagtacaggagtcttcgggggaaggtgccagaggtcttcttgaacgttggatgcccaggttgcctctctgctacccacagtcccggagcccagagaatcatggcctagagcctgggtcagatggagataagacatcctggactccggaatgtcctatgtcctctgattccatgcttcagagccccacatggctactatattcccacccagcagggcgtagagctcggctccacatgggaatctacctgagccgatcccccttggatccccacagctggacagagccctgggtgatctatgagggccccagtggctactctgaccttgcctttcttgggcctatgcctggggcatccctggtttttgcctgtctgtttgagagcgggaccaggacttcctatgaagacatttctttttgcttgttctcactggcggatgtcctggagaatgtgcccactggcttagagatgctaagtctcagggataaggctcaggggcattgctggccctcttgatggcctcaccctctcgtagccgcctggagaggaagggtagactatatagaggaggttaggggtaggtcagcatgatgctaggatggagagagctctgtcccctcgtggatggtggtggtgactcacccggggggccagctgctttctgagtgcaaatgagaaaaataaagagctgcgctgtgacttttctttccacatcaaagcttgggtgtcagtgctttagcttgatgctctgatcaccatgcaaatcttccaccggcgccttgctcagctttcatatcccaagggtgcctgggaggaaggcaacagggacagtggacatcactgcaccactttccacgaccctgtgtgccaacctcagccactttgaaacatgctgatgactgaggtctgttcactttcttaatttcaagcaggagaagcaggttggggagccagcctccccagctagaggggacagaacttgacttgagcaggggggtacctcctaggacctgctccatgtgcctacttctttacccttctctagagagggctcttgtcctgtcagagctgttttctcccttctcttgttttttctttttcaagactgtttctctgtgttagccctggctgtcctggatctcactctgtagatcaggctgaccttgagttcaaagctccatctgcctctacttctcacattactgtgattaaaggcatatactaccactgcctggtgcccttttgtatttcttattaaagtcctaatgtctgattataaaaacagtctgtgtgggctggagtgatggcttactcagtaaagcacttgccatggaatctgggcaatctgagtttcatttttagcatcctgtaaaaatcccaatttgatggtgtacttgtaatgtcagcatggagaggcagagataggtaagttccccaagactctttgaaccgacagcttggcctcactggcacattccaggtctcagtgagagaccctgcctcaaaatacaaagaaagagctgctgaagagtgggtcagagttgacctctgatctccggaagtatatgatacacacccgtgcatgcactcttccttacaaaataaaaagcaaaacaaaaccccaacaggtatatggccattttagaaaaattagaagatttagaaagctatacataaaaaaaaatgacctaaagaaaaatctttactgttctgggcactatccctatcaaaccactgtgttctttggccaagccttggggtggacactgttttgaggtgggtcctgttatctccactaggtagtggagttttgtgtcagactaactgggtcttaaagctgtctttaaggccatcaggagctactgacttgcctgcctcagcagagcatatcctgaaggtcggggttaagtctccttcccgagcgagttgccttccagtgggcccctggactcctaggtcctcagcgctcatcagctgccaaggactctgagggaatgtcctctgactgtggccccgaaaggtaggggagggggatgtgcttaggcttaggacagggtcctgtttcagtctgccttcactgttagtagcactgtgccacatggcacagactgggcgagctttaaaggaaggaggttgatattggttcccacttctggggatcatggttgagcagccttgtctgatgatggttgtcttgatggtagatcgtgaggtagttgatgaaggtatgacatggtgagaaactctgtgtgtgtgtgttattttctctgtgttctacctatacatctatctatgtatatatgtatctatctatctacctggaggctggagagatagcttagtggttaagaacatttgttgttcttgcatagtcctggatttaaattttcagcacccacatggcagctcacaacaacccataaatccagtttcagaggatccaacctctgatataccatgtcagccagagcagacacggctgaaggtggtttgatccccgtatggagaggtgacaattgggaagagagaaagatcaacttaaccatgcaaggaacaggaagttaaatactgaacagggaaggtaaaggcaggaagtagatgtagagggcaaatcaatgaaacccaaacatacccaaattacgctaaacacacactgacatgccaattaaaaggacaaattggctccactggcaaaaccaaaacagacactgaagatccaaacagtcacatgccaactaccgcggagggagacagacacagagaagaccgtgacagacacttggacactcttgagagtggatgtgcaggaagagagctctgccagtggagaagaaagcactcagaagaaagtgacagcagctgtaaatttgtattctgctaatgttatgttccaaagttgaaagcaaaattgtaccaattcataagaacaaacaggctgactctcagttgtgactgaacgtctctcagtaactgacggggcgagcaggccaaaggagagtcggctcagaagggtgcatagccacgccaaatcaaataagcaagtacaaccggcaggctctatttctagcacaaaggggtctgtgcctcattctgtgcttgggtcagagcttgggtctctcatttggatgtaagtggtgtagtggagaagcaggaaataatccggagcgcatattttgattttaacataagtgctgatttgggagggagttttgtcaaattgtgtttttacaatgtttttttttttttaaatgatgcttttttgtaaagtgtacaaatgtgatataagattggttctgctacattcagtttctataaaagtggttctaaaatattgtactgtcaatcatctcatgattattctactgtacacattactgactttgtatgtaataattaatattagaagaaaatataatttatttgaatataaaaaaaaaaaaaaaaaaa

SEQ ID NO: 46 - protein, 380 aa, Artificial Sequence
  Description of Artificial Sequence: Synthetic polypeptide
  MOD_RES (1)..(1): Ala, Arg, Asn, Asp, Gln, Glu, Gly, His, Leu, Lys, Met, Phe, Thr, Val, or not present
  MOD_RES (6)..(6): Phe, Trp, Tyr or Val
  MOD_RES (9)..(9): Lys or Asp
  MOD_RES (62)..(62): Pro, Asn, Asp, His, Glu, Gly, Ser or Thr
  MOD_RES (93)..(93): Ala, Glu, or Lys
  MOD_RES (187)..(187): Arg, Ile, or Lys
  MOD_RES (270)..(270): Gln, Ala, His, Phe, or Pro
  MOD_RES (301)..(301): Ser or Arg
  MOD_RES (302)..(302): Trp or Lys
  MOD_RES (332)..(332): Ala, Cys, Ser, or Val
  MOD_RES (363)..(363): Val or Arg
  MOD_RES (365)..(365): Leu, Gln, His, Ile, Lys, or Ser
XASLPXLQXESVFQSGAHAYRIPALLYLPGQQSLLAFAEQRASKKDEHAELIVLRRGDYDAXTHQVQWQAQEVVAQARLDGHRSMNPCPLYDXQTGTLFLFFIAIPGQVTEQQQLQTRANVTRLCQVTSTDHGRTWSSPRDLTDAAIGPAYREWSTFAVGPGHCLQLHDRARSLVVPAYAYRKLHPXQRPIPSAFCFLSHDHGRTWARGHFVAQDTLECQVAEVETGEQRVVTLNARSHLRARVQAQSTNDGLDFQESQLVKKLVEPPPXGCQGSVISFPSPRSGPGSPAQWLLYTHPTHXXQRADLGAYLNPRPPAPEAWSEPVLLAKGSXAYSDLQSMGTGPDGSPLFGCLYEANDYEEIXFXMFTLKQAFPAEYLPQ

SEQ ID NO: 47 - protein, 380 aa, Artificial Sequence
  Description of Artificial Sequence: Synthetic polypeptide
  MOD_RES (1)..(1): Ala, Arg, Asn, Asp, Gln, Glu, Gly, His, Leu, Lys, Met, Phe, Thr, Val, or not present
  MOD_RES (2)..(2): Ala or Lys
  MOD_RES (4)..(4): Asn or Leu
  MOD_RES (5)..(5): Pro or His
  MOD_RES (6)..(6): Phe, Trp, Tyr or Val
  MOD_RES (9)..(9): Lys or Asp
  MOD_RES (44)..(44): Lys, Arg, or Glu
  MOD_RES (45)..(45): Lys, Ala, Arg, or Glu
  MOD_RES (54)..(54): Leu or Met
  MOD_RES (62)..(62): Pro, Asn, Asp, His, Glu, Gly, Ser or Thr
  MOD_RES (69)..(69): Gln or His
  MOD_RES (78)..(78): Arg or Lys
  MOD_RES (93)..(93): Ala, Glu or Lys
  MOD_RES (107)..(107): Gly or Asp
  MOD_RES (108)..(108): Gln or His
  MOD_RES (112)..(112): Gln, Arg, or Lys
  MOD_RES (125)..(125): Ala, Cys, Ile, Ser, Val, or Leu
  MOD_RES (126)..(126): Gln or Leu
  MOD_RES (150)..(150): Ala or Val
  MOD_RES (164)..(164): Cys or Gly
  MOD_RES (171)..(171): Ala or Gly
  MOD_RES (187)..(187): Arg, Ile, or Lys
  MOD_RES (196)..(196): Ala, Cys, Leu, or Val
  MOD_RES (217)..(217): Leu, Ala, or Val
  MOD_RES (249)..(249): Thr or Ala
  MOD_RES (251)..(251): Asp or Gly
  MOD_RES (257)..(257): Glu or Lys
  MOD_RES (270)..(270): Gln, Ala, His, Phe, or Pro
  MOD_RES (272)..(272): Cys or Val
  MOD_RES (292)..(292): Trp or Arg
  MOD_RES (301)..(301): Ser or Arg
  MOD_RES (302)..(302): Trp or Lys
  MOD_RES (325)..(325): Lys or Val
  MOD_RES (332)..(332): Ala, Cys, Ser, or Val
  MOD_RES (352)..(352): Cys, Leu, or Val
  MOD_RES (363)..(363): Val or Arg
  MOD_RES (365)..(365): Leu, Gln, His, Ile, Lys, or Ser
XXSXXXLQXESVFQSGAHAYRIPALLYLPGQQSLLAFAEQRASXXDEHAELIVXRRGDYDAXTHQVQWXAQEVVAQAXLDGHRSMNPCPLYDXQTGTLFLFFIAIPXXVTEXQQLQTRANVTRLXXVTSTDHGRTWSSPRDLTDAAIGPXYREWSTFAVGPGHXLQLHDRXRSLVVPAYAYRKLHPXQRPIPSAFXFLSHDHGRTWARGHFVAQDTXECQVAEVETGEQRVVTLNARSHLRARVQAQSXNXGLDFQXSQLVKKLVEPPPXGXQGSVISFPSPRSGPGSPAQXLLYTHPTHXXQRADLGAYLNPRPPAPEAWSEPXLLAKGSXAYSDLQSMGTGPDGSPLFGXLYEANDYEEIXFXMFTLKQAFPAEYLPQ

SEQ ID NO: 48 - protein, 380 aa, Artificial Sequence
  Description of Artificial Sequence: Synthetic polypeptide
DASLPYLQKESVFQSGAHAYRIPALLYLPGQQSLLAFAEQRASKKDEHAELIVLRRGDYDAGTHQVQWQAQEVVAQARLDGHRSMNPCPLYDEQTGTLFLFFIAIPGQVTEQQQLQTRANVTRLCQVTSTDHGRTWSSPRDLTDAAIGPAYREWSTFAVGPGHCLQLHDRARSLVVPAYAYRKLHPKQRPIPSAFCFLSHDHGRTWARGHFVAQDTLECQVAEVETGEQRVVTLNARSHLRARVQAQSTNDGLDFQESQLVKKLVEPPPQGCQGSVISFPSPRSGPGSPAQWLLYTHPTHSWQRADLGAYLNPRPPAPEAWSEPVLLAKGSAAYSDLQSMGTGPDGSPLFGCLYEANDYEEIVFLMFTLKQAFPAEYLPQ

SEQ ID NO: 49 - protein, 380 aa, Artificial Sequence
  Description of Artificial Sequence: Synthetic polypeptide
DASLPYLQDESVFQSGAHAYRIPALLYLPGQQSLLAFAEQRASKKDEHAELIVLRRGDYDAPTHQVQWQAQEVVAQARLDGHRSMNPCPLYDEQTGTLFLFFIAIPGQVTEQQQLQTRANVTRLCQVTSTDHGRTWSSPRDLTDAAIGPAYREWSTFAVGPGHCLQLHDRARSLVVPAYAYRKLHPKQRPIPSAFCFLSHDHGRTWARGHFVAQDTLECQVAEVETGEQRVVTLNARSHLRARVQAQSTNDGLDFQESQLVKKLVEPPPQGCQGSVISFPSPRSGPGSPAQWLLYTHPTHSWQRADLGAYLNPRPPAPEAWSEPVLLAKGSAAYSDLQSMGTGPDGSPLFGCLYEANDYEEIRFIMFTLKQAFPAEYLPQ

SEQ ID NO: 50 - protein, 380 aa, Artificial Sequence
  Description of Artificial Sequence: Synthetic polypeptide
DASLPYLQKESVFQSGAHAYRIPALLYLPGQQSLLAFAEQRASKKDEHAELIVLRRGDYDANTHQVQWQAQEVVAQARLDGHRSMNPCPLYDAQTGTLFLFFIAIPGQVTEQQQLQTRANVTRLCQVTSTDHGRTWSSPRDLTDAAIGPAYREWSTFAVGPGHCLQLHDRARSLVVPAYAYRKLHPKQRPIPSAFCFLSHDHGRTWARGHFVAQDTLECQVAEVETGEQRVVTLNARSHLRARVQAQSTNDGLDFQESQLVKKLVEPPPQGCQGSVISFPSPRSGPGSPAQWLLYTHPTHSWQRADLGAYLNPRPPAPEAWSEPVLLAKGSAAYSDLQSMGTGPDGSPLFGCLYEANDYEEIVFLMFTLKQAFPAEYLPQ

SEQ ID NO: 51 - protein, 380 aa, Artificial Sequence
  Description of Artificial Sequence: Synthetic polypeptide
DASLPYLQKESVFQSGAHAYRIPALLYLPGQQSLLAFAEQRASKKDEHAELIVLRRGDYDAPTHQVQWQAQEVVAQARLDGHRSMNPCPLYDAQTGTLFLFFIAIPGQVTEQQQLQTRANVTRLCQVTSTDHGRTWSSPRDLTDAAIGPAYREWSTFAVGPGHCLQLHDRARSLVVPAYAYRKLHPKQRPIPSAFCFLSHDHGRTWARGHFVAQDTLECQVAEVETGEQRVVTLNARSHLRARVQAQSTNDGLDFQESQLVKKLVEPPPAGCQGSVISFPSPRSGPGSPAQWLLYTHPTHRKQRADLGAYLNPRPPAPEAWSEPVLLAKGSAAYSDLQSMGTGPDGSPLFGCLYEANDYEEIVFLMFTLKQAFPAEYLPQ

SEQ ID NO: 52 - protein, 380 aa, Artificial Sequence
  Description of Artificial Sequence: Synthetic polypeptide
DASLPYLQKESVFQSGAHAYRIPALLYLPGQQSLLAFAEQRASKKDEHAELIVLRRGDYDASTHQVQWQAQEVVAQARLDGHRSMNPCPLYDAQTGTLFLFFIAIPGQVTEQQQLQTRANVTRLCQVTSTDHGRTWSSPRDLTDAAIGPAYREWSTFAVGPGHCLQLHDRARSLVVPAYAYRKLHPKQRPIPSAFCFLSHDHGRTWARGHFVAQDTLECQVAEVETGEQRVVTLNARSHLRARVQAQSTNDGLDFQESQLVKKLVEPPPAGCQGSVISFPSPRSGPGSPAQWLLYTHPTHRKQRADLGAYLNPRPPAPEAWSEPVLLAKGSAAYSDLQSMGTGPDGSPLFGCLYEANDYEEIVFLMFTLKQAFPAEYLPQ

SEQ ID NO: 53 - protein, 380 aa, Artificial Sequence
  Description of Artificial Sequence: Synthetic polypeptide
DASLPYLQKESVFQSGAHAYRIPALLYLPGQQSLLAFAEQRASKKDEHAELIVLRRGDYDATTHQVQWQAQEVVAQARLDGHRSMNPCPLYDAQTGTLFLFFIAIPGQVTEQQQLQTRANVTRLCQVTSTDHGRTWSSPRDLTDAAIGPAYREWSTFAVGPGHCLQLHDRARSLVVPAYAYRKLHPKQRPIPSAFCFLSHDHGRTWARGHFVAQDTLECQVAEVETGEQRVVTLNARSHLRARVQAQSTNDGLDFQESQLVKKLVEPPPAGCQGSVISFPSPRSGPGSPAQWLLYTHPTHRKQRADLGAYLNPRPPAPEAWSEPVLLAKGSAAYSDLQSMGTGPDGSPLFGCLYEANDYEEIVFLMFTLKQAFPAEYLPQ

SEQ ID NO: 54 - protein, 380 aa, Artificial Sequence
  Description of Artificial Sequence: Synthetic polypeptide
DASLPYLQKESVFQSGAHAYRIPALLYLPGQQSLLAFAEQRASKKDEHAELIVLRRGDYDANTHQVQWQAQEVVAQARLDGHRSMNPCPLYDAQTGTLFLFFIAIPGQVTEQQQLQTRANVTRLCQVTSTDHGRTWSSPRDLTDAAIGPAYREWSTFAVGPGHCLQLHDRARSLVVPAYAYRKLHPKQRPIPSAFCFLSHDHGRTWARGHFVAQDTLECQVAEVETGEQRVVTLNARSHLRARVQAQSTNDGLDFQESQLVKKLVEPPPAGCQGSVISFPSPRSGPGSPAQWLLYTHPTHRKQRADLGAYLNPRPPAPEAWSEPVLLAKGSAAYSDLQSMGTGPDGSPLFGCLYEANDYEEIVFLMFTLKQAFPAEYLPQ

SEQ ID NO: 55 - protein, 379 aa, Artificial Sequence
  Description of Artificial Sequence: Synthetic polypeptide
ASLPYLQKESVFQSGAHAYRIPALLYLPGQQSLLAFAEQRASKKDEHAELIVLRRGDYDAPTHQVQWQAQEVVAQARLDGHRSMNPCPLYDAQTGTLFLFFIAIPGQVTEQQQLQTRANVTRLCQVTSTDHGRTWSSPRDLTDAAIGPAYREWSTFAVGPGHCLQLHDRARSLVVPAYAYRKLHPKQRPIPSAFCFLSHDHGRTWARGHFVAQDTLECQVAEVETGEQRVVTLNARSHLRARVQAQSTNDGLDFQESQLVKKLVEPPPQGCQGSVISFPSPRSGPGSPAQWLLYTHPTHSWQRADLGAYLNPRPPAPEAWSEPVLLAKGSCAYSDLQSMGTGPDGSPLFGCLYEANDYEEIVFLMFTLKQAFPAEYLPQ

SEQ ID NO: 56 - protein, 380 aa, Artificial Sequence
  Description of Artificial Sequence: Synthetic polypeptide
MASLPYLQKESVFQSGAHAYRIPALLYLPGQQSLLAFAEQRASKKDEHAELIVLRRGDYDAPTHQVQWQAQEVVAQARLDGHRSMNPCPLYDAQTGTLFLFFIAIPGQVTEQQQLQTRANVTRLCQVTSTDHGRTWSSPRDLTDAAIGPAYREWSTFAVGPGHCLQLHDRARSLVVPAYAYRKLHPKQRPIPSAFCFLSHDHGRTWARGHFVAQDTLECQVAEVETGEQRVVTLNARSHLRARVQAQSTNDGLDFQESQLVKKLVEPPPQGCQGSVISFPSPRSGPGSPAQWLLYTHPTHSWQRADLGAYLNPRPPAPEAWSEPVLLAKGSCAYSDLQSMGTGPDGSPLFGCLYEANDYEEIVFLMFTLKQAFPAEYLPQ

SEQ ID NO: 57 - protein, 379 aa, Artificial Sequence
  Description of Artificial Sequence: Synthetic polypeptide
ASLPYLQKESVFQSGAHAYRIPALLYLPGQQSLLAFAEQRASKKDEHAELIVLRRGDYDAPTHQVQWQAQEVVAQARLDGHRSMNPCPLYDAQTGTLFLFFIAIPGQVTEQQQLQTRANVTRLCQVTSTDHGRTWSSPRDLTDAAIGPAYREWSTFAVGPGHCLQLHDRARSLVVPAYAYRKLHPKQRPIPSAFCFLSHDHGRTWARGHFVAQDTLECQVAEVETGEQRVVTLNARSHLRARVQAQSTNDGLDFQESQLVKKLVEPPPQGCQGSVISFPSPRSGPGSPAQWLLYTHPTHSWQRADLGAYLNPRPPAPEAWSEPVLLAKGSAAYSDLQSMGTGPDGSPLFGCLYEANDYEEIVFLMFTLKQAFPAEYLPQ

SEQ ID NO: 58 - protein, 380 aa, Artificial Sequence
  Description of Artificial Sequence: Synthetic polypeptide
DASLPYLQKESVFQSGAHAYRIPALLYLPGQQSLLAFAEQRASKKDEHAELIVLRRGDYDAPTHQVQWQAQEVVAQARLDGHRSMNPCPLYDAQTGTLFLFFIAIPGQVTEQQQLQTRANVTRLCQVTSTDHGRTWSSPRDLTDAAIGPAYREWSTFAVGPGHCLQLHDRARSLVVPAYAYRKLHPKQRPIPSAFCFLSHDHGRTWARGHFVAQDTLECQVAEVETGEQRVVTLNARSHLRARVQAQSTNDGLDFQESQLVKKLVEPPPQGCQGSVISFPSPRSGPGSPAQWLLYTHPTHSWQRADLGAYLNPRPPAPEAWSEPVLLAKGSAAYSDLQSMGTGPDGSPLFGCLYEANDYEEIVFLMFTLKQAFPAEYLPQ

SEQ ID NO: 59 - protein, 380 aa, Artificial Sequence
  Description of Artificial Sequence: Synthetic polypeptide
DASLPYLQKESVFQSGAHAYRIPALLYLPGQQSLLAFAEQRASKKDEHAELIVLRRGDYDAPTHQVQWQAQEVVAQARLDGHRSMNPCPLYDAQTGTLFLFFIAIPGQVTEQQQLQTRANVTRLCQVTSTDHGRTWSSPRDLTDAAIGPAYREWSTFAVGPGHCLQLHDRARSLVVPAYAYRKLHPKQRPIPSAFCFLSHDHGRTWARGHFVAQDTLECQVAEVETGEQRVVTLNARSHLRARVQAQSTNDGLDFQESQLVKKLVEPPPQGCQGSVISFPSPRSGPGSPAQWLLYTHPTHSWQRADLGAYLNPRPPAPEAWSEPVLLAKGSCAYSDLQSMGTGPDGSPLFGCLYEANDYEEIVFLMFTLKQAFPAEYLPQ

SEQ ID NO: 60 - protein, 380 aa, Artificial Sequence
  Description of Artificial Sequence: Synthetic polypeptide
AASLPYLQKESVFQSGAHAYRIPALLYLPGQQSLLAFAEQRASKKDEHAELIVLRRGDYDAPTHQVQWQAQEVVAQARLDGHRSMNPCPLYDAQTGTLFLFFIAIPGQVTEQQQLQTRANVTRLCQVTSTDHGRTWSSPRDLTDAAIGPAYREWSTFAVGPGHCLQLHDRARSLVVPAYAYRKLHPKQRPIPSAFCFLSHDHGRTWARGHFVAQDTLECQVAEVETGEQRVVTLNARSHLRARVQAQSTNDGLDFQESQLVKKLVEPPPQGCQGSVISFPSPRSGPGSPAQWLLYTHPTHSWQRADLGAYLNPRPPAPEAWSEPVLLAKGSAAYSDLQSMGTGPDGSPLFGCLYEANDYEEIVFLMFTLKQAFPAEYLPQ

SEQ ID NO: 61 - protein, 380 aa, Artificial Sequence
  Description of Artificial Sequence: Synthetic polypeptide
MASLPYLQKESVFQSGAHAYRIPALLYLPGQQSLLAFAEQRASKKDEHAELIVLRRGDYDAPTHQVQWQAQEVVAQARLDGHRSMNPCPLYDAQTGTLFLFFIAIPGQVTEQQQLQTRANVTRLCQVTSTDHGRTWSSPRDLTDAAIGPAYREWSTFAVGPGHCLQLHDRARSLVVPAYAYRKLHPKQRPIPSAFCFLSHDHGRTWARGHFVAQDTLECQVAEVETGEQRVVTLNARSHLRARVQAQSTNDGLDFQESQLVKKLVEPPPQGCQGSVISFPSPRSGPGSPAQWLLYTHPTHSWQRADLGAYLNPRPPAPEAWSEPVLLAKGSAAYSDLQSMGTGPDGSPLFGCLYEANDYEEIVFLMFTLKQAFPAEYLPQ

SEQ ID NO: 62 - protein, 380 aa, Artificial Sequence
  Description of Artificial Sequence: Synthetic polypeptide
AASLPYLQKESVFQSGAHAYRIPALLYLPGQQSLLAFAEQRASKKDEHAELIVLRRGDYDAPTHQVQWQAQEVVAQARLDGHRSMNPCPLYDAQTGTLFLFFIAIPGQVTEQQQLQTRANVTRLCQVTSTDHGRTWSSPRDLTDAAIGPAYREWSTFAVGPGHCLQLHDRARSLVVPAYAYRKLHPKQRPIPSAFCFLSHDHGRTWARGHFVAQDTLECQVAEVETGEQRVVTLNARSHLRARVQAQSTNDGLDFQESQLVKKLVEPPPQGCQGSVISFPSPRSGPGSPAQWLLYTHPTHSWQRADLGAYLNPRPPAPEAWSEPVLLAKGSCAYSDLQSMGTGPDGSPLFGCLYEANDYEEIVFLMFTLKQAFPAEYLPQ

SEQ ID NO: 63 - protein, 450 aa, Artificial Sequence
  Description of Artificial Sequence: Synthetic polypeptide
EVQLVESGGGLVQPGGSLRLSCAASGFNIKDTYIHWVRQAPGKGLEWVARIYPTNGYTRYADSVKGRFTISADTSKNTAYLQMNSLRAEDTAVYYCSRWGGDGFYAMDYWGQGTLVTVSSASTKGPSVFPLAPSSKSTSGGTAALGCLVKDYFPEPVTVSWNSGALTSGVHTFPAVLQSSGLYSLSSVVTVPSSSLGTQTYICNVNHKPSNTKVDKKVEPKSCDKTHTCPPCPAPELLGGPSVFLFPPKPKDTLMISRTPEVTCVVVDVSHEDPEVKFNWYVDGVEVHNAKTKPREEQYNSTYRVVSVLTVLHQDWLNGKEYKCKVSNKALPAPIEKTISKAKGQPREPQVYTLPPSREEMTKNQVSLYCLVKGFYPSDIAVEWESNGQPENNYKTTPPVLDSDGSFFLYSKLTVDKSRWQQGNVFSCSVMHEALHNHYTQKSLSLSPGK

SEQ ID NO: 64 - protein, 214 aa, Artificial Sequence
  Description of Artificial Sequence: Synthetic polypeptide
DIQMTQSPSSLSASVGDRVTITCRASQDVNTAVAWYQQKPGKAPKLLIYSASFLYSGVPSRFSGSRSGTDFTLTISSLQPEDFATYYCQQHYTTPPTFGQGTKVEIKRTVAAPSVFIFPPSDEQLKSGTASVVCLLNNFYPREAKVQWKVDNALQSGNSQESVTEQDSKDSTYSLSSTLTLSKADYEKHKVYACEVTHQGLSSPVTKSFNRGEC

SEQ ID NO: 65 - protein, 242 aa, Artificial Sequence
  Description of Artificial Sequence: Synthetic polypeptide
EVQLVESGGGLVQPGGSLRLSCAASGFNIKDTYIHWVRQAPGKGLEWVARIYPTNGYTRYADSVKGRFTISADTSKNTAYLQMNSLRAEDTAVYYCSRWGGDGFYAMDYWGQGTLVTVSSGGGGSGGGGSGGGGSDIQMTQSPSSLSASVGDRVTITCRASQDVNTAVAWYQQKPGKAPKLLIYSASFLYSGVPSRFSGSRSGTDFTLTISSLQPEDFATYYCQQHYTTPPTFGQGTKVEIK

SEQ ID NO: 66 - protein, 214 aa, Artificial Sequence; identical to SEQ ID NO: 64
  Description of Artificial Sequence: Synthetic polypeptide

SEQ ID NO: 67 - protein, 450 aa, Artificial Sequence; identical to SEQ ID NO: 63
  Description of Artificial Sequence: Synthetic polypeptide

SEQ ID NO: 68 - protein, 617 aa, Artificial Sequence
  Description of Artificial Sequence: Synthetic polypeptide
DASLPYLQKESVFQSGAHAYRIPALLYLPGQQSLLAFAEQRASKKDEHAELIVLRRGDYDAGTHQVQWQAQEVVAQARLDGHRSMNPCPLYDEQTGTLFLFFIAIPGQVTEQQQLQTRANVTRLCQVTSTDHGRTWSSPRDLTDAAIGPAYREWSTFAVGPGHCLQLHDRARSLVVPAYAYRKLHPKQRPIPSAFCFLSHDHGRTWARGHFVAQDTLECQVAEVETGEQRVVTLNARSHLRARVQAQSTNDGLDFQESQLVKKLVEPPPQGCQGSVISFPSPRSGPGSPAQWLLYTHPTHSWQRADLGAYLNPRPPAPEAWSEPVLLAKGSAAYSDLQSMGTGPDGSPLFGCLYEANDYEEIVFLMFTLKQAFPAEYLPQGGGGSGGGGSDKTHTCPPCPAPELLGGPSVFLFPPKPKDTLMISRTPEVTCVVVDVSHEDPEVKFNWYVDGVEVHNAKTKPREEQYNSTYRVVSVLTVLHQDWLNGKEYKCKVSNKALPAPIEKTISKAKGQPREPQVYTLPPSREEMTKNQVSLTCLVKGFYPSDIAVEWESNGQPENNYKTTPPVLDSDGSFFLTSKLTVDKSRWQQGNVFSCSVMHEALHNHYTQKSLSLSPGK

SEQ ID NO: 69 - protein, 617 aa, Artificial Sequence
  Description of Artificial Sequence: Synthetic polypeptide
DASLPYLQDESVFQSGAHAYRIPALLYLPGQQSLLAFAEQRASKKDEHAELIVLRRGDYDAPTHQVQWQAQEVVAQARLDGHRSMNPCPLYDEQTGTLFLFFIAIPGQVTEQQQLQTRANVTRLCQVTSTDHGRTWSSPRDLTDAAIGPAYREWSTFAVGPGHCLQLHDRARSLVVPAYAYRKLHPKQRPIPSAFCFLSHDHGRTWARGHFVAQDTLECQVAEVETGEQRVVTLNARSHLRARVQAQSTNDGLDFQESQLVKKLVEPPPQGCQGSVISFPSPRSGPGSPAQWLLYTHPTHSWQRADLGAYLNPRPPAPEAWSEPVLLAKGSAAYSDLQSMGTGPDGSPLFGCLYEANDYEEIRFIMFTLKQAFPAEYLPQGGGGSGGGGSDKTHTCPPCPAPELLGGPSVFLFPPKPKDTLMISRTPEVTCVVVDVSHEDPEVKFNWYVDGVEVHNAKTKPREEQYNSTYRVVSVLTVLHQDWLNGKEYKCKVSNKALPAPIEKTISKAKGQPREPQVYTLPPSREEMTKNQVSLTCLVKGFYPSDIAVEWESNGQPENNYKTTPPVLDSDGSFFLTSKLTVDKSRWQQGNVFSCSVMHEALHNHYTQKSLSLSPGK

SEQ ID NO: 70 - protein, 617 aa, Artificial Sequence
  Description of Artificial Sequence: Synthetic polypeptide
DASLPYLQKESVFQSGAHAYRIPALLYLPGQQSLLAFAEQRASKKDEHAELIVLRRGDYDANTHQVQWQAQEVVAQARLDGHRSMNPCPLYDAQTGTLFLFFIAIPGQVTEQQQLQTRANVTRLCQVTSTDHGRTWSSPRDLTDAAIGPAYREWSTFAVGPGHCLQLHDRARSLVVPAYAYRKLHPKQRPIPSAFCFLSHDHGRTWARGHFVAQDTLECQVAEVETGEQRVVTLNARSHLRARVQAQSTNDGLDFQESQLVKKLVEPPPQGCQGSVISFPSPRSGPGSPAQWLLYTHPTHSWQRADLGAYLNPRPPAPEAWSEPVLLAKGSAAYSDLQSMGTGPDGSPLFGCLYEANDYEEIVFLMFTLKQAFPAEYLPQGGGGSGGGGSDKTHTCPPCPAPELLGGPSVFLFPPKPKDTLMISRTPEVTCVVVDVSHEDPEVKFNWYVDGVEVHNAKTKPREEQYNSTYRVVSVLTVLHQDWLNGKEYKCKVSNKALPAPIEKTISKAKGQPREPQVYTLPPSREEMTKNQVSLTCLVKGFYPSDIAVEWESNGQPENNYKTTPPVLDSDGSFFLTSKLTVDKSRWQQGNVFSCSVMHEALHNHYTQKSLSLSPGK

SEQ ID NO: 71 - protein, 617 aa, Artificial Sequence
  Description of Artificial Sequence: Synthetic polypeptide
DASLPYLQKESVFQSGAHAYRIPALLYLPGQQSLLAFAEQRASKKDEHAELIVLRRGDYDAPTHQVQWQAQEVVAQARLDGHRSMNPCPLYDAQTGTLFLFFIAIPGQVTEQQQLQTRANVTRLCQVTSTDHGRTWSSPRDLTDAAIGPAYREWSTFAVGPGHCLQLHDRARSLVVPAYAYRKLHPKQRPIPSAFCFLSHDHGRTWARGHFVAQDTLECQVAEVETGEQRVVTLNARSHLRARVQAQSTNDGLDFQESQLVKKLVEPPPAGCQGSVISFPSPRSGPGSPAQWLLYTHPTHRKQRADLGAYLNPRPPAPEAWSEPVLLAKGSAAYSDLQSMGTGPDGSPLFGCLYEANDYEEIVFLMFTLKQAFPAEYLPQGGGGSGGGGSDKTHTCPPCPAPELLGGPSVFLFPPKPKDTLMISRTPEVTCVVVDVSHEDPEVKFNWYVDGVEVHNAKTKPREEQYNSTYRVVSVLTVLHQDWLNGKEYKCKVSNKALPAPIEKTISKAKGQPREPQVYTLPPSREEMTKNQVSLTCLVKGFYPSDIAVEWESNGQPENNYKTTPPVLDSDGSFFLTSKLTVDKSRWQQGNVFSCSVMHEALHNHYTQKSLSLSPGK

SEQ ID NO: 72 - protein, 617 aa, Artificial Sequence
  Description of Artificial Sequence: Synthetic polypeptide
DASLPYLQKESVFQSGAHAYRIPALLYLPGQQSLLAFAEQRASKKDEHAELIVLRRGDYDASTHQVQWQAQEVVAQARLDGHRSMNPCPLYDAQTGTLFLFFIAIPGQVTEQQQLQTRANVTRLCQVTSTDHGRTWSSPRDLTDAAIGPAYREWSTFAVGPGHCLQLHDRARSLVVPAYAYRKLHPKQRPIPSAFCFLSHDHGRTWARGHFVAQDTLECQVAEVETGEQRVVTLNARSHLRARVQAQSTNDGLDFQESQLVKKLVEPPPAGCQGSVISFPSPRSGPGSPAQWLLYTHPTHRKQRADLGAYLNPRPPAPEAWSEPVLLAKGSAAYSDLQSMGTGPDGSPLFGCLYEANDYEEIVFLMFTLKQAFPAEYLPQGGGGSGGGGSDKTHTCPPCPAPELLGGPSVFLFPPKPKDTLMISRTPEVTCVVVDVSHEDPEVKFNWYVDGVEVHNAKTKPREEQYNSTYRVVSVLTVLHQDWLNGKEYKCKVSNKALPAPIEKTISKAKGQPREPQVYTLPPSREEMTKNQVSLTCLVKGFYPSDIAVEWESNGQPENNYKTTPPVLDSDGSFFLTSKLTVDKSRWQQGNVFSCSVMHEALHNHYTQKSLSLSPGK

SEQ ID NO: 73 - protein, 617 aa, Artificial Sequence
  Description of Artificial Sequence: Synthetic polypeptide
DASLPYLQKESVFQSGAHAYRIPALLYLPGQQSLLAFAEQRASKKDEHAELIVLRRGDYDATTHQVQWQAQEVVAQARLDGHRSMNPCPLYDAQTGTLFLFFIAIPGQVTEQQQLQTRANVTRLCQVTSTDHGRTWSSPRDLTDAAIGPAYREWSTFAVGPGHCLQLHDRARSLVVPAYAYRKLHPKQRPIPSAFCFLSHDHGRTWARGHFVAQDTLECQVAEVETGEQRVVTLNARSHLRARVQAQSTNDGLDFQESQLVKKLVEPPPAGCQGSVISFPSPRSGPGSPAQWLLYTHPTHRKQRADLGAYLNPRPPAPEAWSEPVLLAKGSAAYSDLQSMGTGPDGSPLFGCLYEANDYEEIVFLMFTLKQAFPAEYLPQGGGGSGGGGSDKTHTCPPCPAPELLGGPSVFLFPPKPKDTLMISRTPEVTCVVVDVSHEDPEVKFNWYVDGVEVHNAKTKPREEQYNSTYRVVSVLTVLHQDWLNGKEYKCKVSNKALPAPIEKTISKAKGQPREPQVYTLPPSREEMTKNQVSLTCLVKGFYPSDIAVEWESNGQPENNYKTTPPVLDSDGSFFLTSKLTVDKSRWQQGNVFSCSVMHEALHNHYTQKSLSLSPGK

SEQ ID NO: 74 - protein, 617 aa, Artificial Sequence
  Description of Artificial Sequence: Synthetic polypeptide
DASLPYLQKESVFQSGAHAYRIPALLYLPGQQSLLAFAEQRASKKDEHAELIVLRRGDYDANTHQVQWQAQEVVAQARLDGHRSMNPCPLYDAQTGTLFLFFIAIPGQVTEQQQLQTRANVTRLCQVTSTDHGRTWSSPRDLTDAAIGPAYREWSTFAVGPGHCLQLHDRARSLVVPAYAYRKLHPKQRPIPSAFCFLSHDHGRTWARGHFVAQDTLECQVAEVETGEQRVVTLNARSHLRARVQAQSTNDGLDFQESQLVKKLVEPPPAGCQGSVISFPSPRSGPGSPAQWLLYTHPTHRKQRADLGAYLNPRPPAPEAWSEPVLLAKGSAAYSDLQSMGTGPDGSPLFGCLYEANDYEEIVFLMFTLKQAFPAEYLPQGGGGSGGGGSDKTHTCPPCPAPELLGGPSVFLFPPKPKDTLMISRTPEVTCVVVDVSHEDPEVKFNWYVDGVEVHNAKTKPREEQYNSTYRVVSVLTVLHQDWLNGKEYKCKVSNKALPAPIEKTISKAKGQPREPQVYTLPPSREEMTKNQVSLTCLVKGFYPSDIAVEWESNGQPENNYKTTPPVLDSDGSFFLTSKLTVDKSRWQQGNVFSCSVMHEALHNHYTQKSLSLSPGK

SEQ ID NO: 75 - protein, 617 aa, Artificial Sequence
  Description of Artificial Sequence: Synthetic polypeptide
  MOD_RES (1)..(1): Ala, Arg, Asn, Asp, Gln, Glu, Gly, His, Leu, Lys, Met, Phe, Thr, Val, or not present
  MOD_RES (6)..(6): Phe, Trp, Tyr or Val
  MOD_RES (9)..(9): Lys or Asp
  MOD_RES (62)..(62): Pro, Asn, Asp, His, Glu, Gly, Ser or Thr
  MOD_RES (93)..(93): Ala, Glu, or Lys
  MOD_RES (187)..(187): Arg, Ile, or Lys
  MOD_RES (270)..(270): Gln, Ala, His, Phe, or Pro
  MOD_RES (301)..(301): Ser or Arg
  MOD_RES (302)..(302): Trp or Lys
  MOD_RES (332)..(332): Ala, Cys, Ser, or Val
  MOD_RES (363)..(363): Val or Arg
  MOD_RES (365)..(365): Leu, Gln, His, Ile, Lys, or Ser
XASLPXLQXESVFQSGAHAYRIPALLYLPGQQSLLAFAEQRASKKDEHAELIVLRRGDYDAXTHQVQWQAQEVVAQARLDGHRSMNPCPLYDXQTGTLFLFFIAIPGQVTEQQQLQTRANVTRLCQVTSTDHGRTWSSPRDLTDAAIGPAYREWSTFAVGPGHCLQLHDRARSLVVPAYAYRKLHPXQRPIPSAFCFLSHDHGRTWARGHFVAQDTLECQVAEVETGEQRVVTLNARSHLRARVQAQSTNDGLDFQESQLVKKLVEPPPXGCQGSVISFPSPRSGPGSPAQWLLYTHPTHXXQRADLGAYLNPRPPAPEAWSEPVLLAKGSXAYSDLQSMGTGPDGSPLFGCLYEANDYEEIXFXMFTLKQAFPAEYLPQGGGGSGGGGSDKTHTCPPCPAPELLGGPSVFLFPPKPKDTLMISRTPEVTCVVVDVSHEDPEVKFNWYVDGVEVHNAKTKPREEQYNSTYRVVSVLTVLHQDWLNGKEYKCKVSNKALPAPIEKTISKAKGQPREPQVYTLPPSREEMTKNQVSLTCLVKGFYPSDIAVEWESNGQPENNYKTTPPVLDSDGSFFLTSKLTVDKSRWQQGNVFSCSVMHEALHNHYTQKSLSLSPGK

SEQ ID NO: 76 - protein, 617 aa, Artificial Sequence
  Description of Artificial Sequence: Synthetic polypeptide
  MOD_RES (1)..(1): Ala, Arg, Asn, Asp, Gln, Glu, Gly, His, Leu, Lys, Met, Phe, Thr, Val, or not present
  MOD_RES (2)..(2): Ala or Lys
  MOD_RES (4)..(4): Asn or Leu
  MOD_RES (5)..(5): Pro or His
  MOD_RES (6)..(6): Phe, Trp, Tyr or Val
  MOD_RES (9)..(9): Lys or Asp
  MOD_RES (44)..(44): Lys, Arg, or Glu
  MOD_RES (45)..(45): Lys, Ala, Arg, or Glu
  MOD_RES (54)..(54): Leu or Met
  MOD_RES (62)..(62): Pro, Asn, Asp, His, Glu, Gly, Ser or Thr
  MOD_RES (69)..(69): Gln or His
  MOD_RES (78)..(78): Arg or Lys
  MOD_RES (93)..(93): Ala, Glu or Lys
  MOD_RES (107)..(107): Gly or Asp
  MOD_RES (108)..(108): Gln or His
  MOD_RES (112)..(112): Gln, Arg, or Lys
  MOD_RES (125)..(125): Ala, Cys, Ile, Ser, Val, or Leu
  MOD_RES (126)..(126): Gln or Leu
  MOD_RES (150)..(150): Ala or Val
  MOD_RES (164)..(164): Cys or Gly
  MOD_RES (171)..(171): Ala or Gly
  MOD_RES (187)..(187): Arg, Ile, or Lys
  MOD_RES (196)..(196): Ala, Cys, Leu, or Val
  MOD_RES (217)..(217): Leu, Ala, or Val
  MOD_RES (249)..(249): Thr or Ala
  MOD_RES (251)..(251): Asp or Gly
  MOD_RES (257)..(257): Glu or Lys
  MOD_RES (270)..(270): Gln, Ala, His, Phe, or Pro
  MOD_RES (272)..(272): Cys or Val
  MOD_RES (292)..(292): Trp or Arg
  MOD_RES (301)..(301): Ser or Arg
  MOD_RES (302)..(302): Trp or Lys
  MOD_RES (325)..(325): Lys or Val
  MOD_RES (332)..(332): Ala, Cys, Ser, or Val
  MOD_RES (352)..(352): Cys, Leu, or Val
  MOD_RES (363)..(363): Val or Arg
  MOD_RES (365)..(365): Leu, Gln, His, Ile, Lys, or Ser
XXSXXXLQXESVFQSGAHAYRIPALLYLPGQQSLLAFAEQRASXXDEHAELIVXRRGDYDAXTHQVQWXAQEVVAQAXLDGHRSMNPCPLYDXQTGTLFLFFIAIPXXVTEXQQLQTRANVTRLXXVTSTDHGRTWSSPRDLTDAAIGPXYREWSTFAVGPGHXLQLHDRXRSLVVPAYAYRKLHPXQRPIPSAFXFLSHDHGRTWARGHFVAQDTXECQVAEVETGEQRVVTLNARSHLRARVQAQSXNXGLDFQXSQLVKKLVEPPPXGXQGSVISFPSPRSGPGSPAQXLLYTHPTHXXQRADLGAYLNPRPPAPEAWSEPXLLAKGSXAYSDLQSMGTGPDGSPLFGXLYEANDYEEIXFXMFTLKQAFPAEYLPQGGGGSGGGGSDKTHTCPPCPAPELLGGPSVFLFPPKPKDTLMISRTPEVTCVVVDVSHEDPEVKFNWYVDGVEVHNAKTKPREEQYNSTYRVVSVLTVLHQDWLNGKEYKCKVSNKALPAPIEKTISKAKGQPREPQVYTLPPSREEMTKNQVSLTCLVKGFYPSDIAVEWESNGQPENNYKTTPPVLDSDGSFFLTSKLTVDKSRWQQGNVFSCSVMHEALHNHYTQKSLSLSPGK

SEQ ID NO: 77 - protein, 874 aa, Artificial Sequence
  Description of Artificial Sequence: Synthetic polypeptide
DASLPYLQKESVFQSGAHAYRIPALLYLPGQQSLLAFAEQRASKKDEHAELIVLRRGDYDAGTHQVQWQAQEVVAQARLDGHRSMNPCPLYDEQTGTLFLFFIAIPGQVTEQQQLQTRANVTRLCQVTSTDHGRTWSSPRDLTDAAIGPAYREWSTFAVGPGHCLQLHDRARSLVVPAYAYRKLHPKQRPIPSAFCFLSHDHGRTWARGHFVAQDTLECQVAEVETGEQRVVTLNARSHLRARVQAQSTNDGLDFQESQLVKKLVEPPPQGCQGSVISFPSPRSGPGSPAQWLLYTHPTHSWQRADLGAYLNPRPPAPEAWSEPVLLAKGSAAYSDLQSMGTGPDGSPLFGCLYEANDYEEIVFLMFTLKQAFPAEYLPQGGGGSGGGGSDKTHTCPPCPAPELLGGPSVFLFPPKPKDTLMISRTPEVTCVVVDVSHEDPEVKFNWYVDGVEVHNAKTKPREEQYNSTYRVVSVLTVLHQDWLNGKEYKCKVSNKALPAPIEKTISKAKGQPREPQVYTLPPSREEMTKNQVSLTCLVKGFYPSDIAVEWESNGQPENNYKTTPPVLDSDGSFFLYSKLTVDKSRWQQGNVFSCSVMHEALHNHYTQKSLSLSPGKGGGGSGGGGSGGGGSEVQLVESGGGLVQPGGSLRLSCAASGFNIKDTYIHWVRQAPGKGLEWVARIYPTNGYTRYADSVKGRFTISADTSKNTAYLQMNSLRAEDTAVYYCSRWGGDGFYAMDYWGQGTLVTVSSGGGGSGGGGSGGGGSDIQMTQSPSSLSASVGDRVTITCRASQDVNTAVAWYQQKPGKAPKLLIYSASFLYSGVPSRFSGSRSGTDFTLTISSLQPEDFATYYCQQHYTTPPTFGQGTKVEIK

SEQ ID NO: 78 - protein, 874 aa, Artificial Sequence
  Description of Artificial Sequence: Synthetic polypeptide
DASLPYLQDESVFQSGAHAYRIPALLYLPGQQSLLAFAEQRASKKDEHAELIVLRRGDYDAPTHQVQWQAQEVVAQARLDGHRSMNPCPLYDEQTGTLFLFFIAIPGQVTEQQQLQTRANVTRLCQVTSTDHGRTWSSPRDLTDAAIGPAYREWSTFAVGPGHCLQLHDRARSLVVPAYAYRKLHPKQRPIPSAFCFLSHDHGRTWARGHFVAQDTLECQVAEVETGEQRVVTLNARSHLRARVQAQSTNDGLDFQESQLVKKLVEPPPQGCQGSVISFPSPRSGPGSPAQWLLYTHPTHSWQRADLGAYLNPRPPAPEAWSEPVLLAKGSAAYSDLQSMGTGPDGSPLFGCLYEANDYEEIRFIMFTLKQAFPAEYLPQGGGGSGGGGSDKTHTCPPCPAPELLGGPSVFLFPPKPKDTLMISRTPEVTCVVVDVSHEDPEVKFNWYVDGVEVHNAKTKPREEQYNSTYRVVSVLTVLHQDWLNGKEYKCKVSNKALPAPIEKTISKAKGQPREPQVYTLPPSREEMTKNQVSLTCLVKGFYPSDIAVEWESNGQPENNYKTTPPVLDSDGSFFLYSKLTVDKSRWQQGNVFSCSVMHEALHNHYTQKSLSLSPGKGGGGSGGGGSGGGGSEVQLVESGGGLVQPGGSLRLSCAASGFNIKDTYIHWVRQAPGKGLEWVARIYPTNGYTRYADSVKGRFTISADTSKNTAYLQMNSLRAEDTAVYYCSRWGGDGFYAMDYWGQGTLVTVSSGGGGSGGGGSGGGGSDIQMTQSPSSLSASVGDRVTITCRASQDVNTAVAWYQQKPGKAPKLLIYSASFLYSGVPSRFSGSRSGTDFTLTISSLQPEDFATYYCQQHYTTPPTFGQGTKVEIK

SEQ ID NO: 79 - protein, 874 aa, Artificial Sequence
  Description of Artificial Sequence: Synthetic polypeptide
DASLPYLQKESVFQSGAHAYRIPALLYLPGQQSLLAFAEQRASKKDEHAELIVLRRGDYDANTHQVQWQAQEVVAQARLDGHRSMNPCPLYDAQTGTLFLFFIAIPGQVTEQQQLQTRANVTRLCQVTSTDHGRTWSSPRDLTDAAIGPAYREWSTFAVGPGHCLQLHDRARSLVVPAYAYRKLHPKQRPIPSAFCFLSHDHGRTWARGHFVAQDTLECQVAEVETGEQRVVTLNARSHLRARVQAQSTNDGLDFQESQLVKKLVEPPPQGCQGSVISFPSPRSGPGSPAQWLLYTHPTHSWQRADLGAYLNPRPPAPEAWSEPVLLAKGSAAYSDLQSMGTGPDGSPLFGCLYEANDYEEIVFLMFTLKQAFPAEYLPQGGGGSGGGGSDKTHTCPPCPAPELLGGPSVFLFPPKPKDTLMISRTPEVTCVVVDVSHEDPEVKFNWYVDGVEVHNAKTKPREEQYNSTYRVVSVLTVLHQDWLNGKEYKCKVSNKALPAPIEKTISKAKGQPREPQVYTLPPSREEMTKNQVSLTCLVKGFYPSDIAVEWESNGQPENNYKTTPPVLDSDGSFFLYSKLTVDKSRWQQGNVFSCSVMHEALHNHYTQKSLSLSPGKGGGGSGGGGSGGGGSEVQLVESGGGLVQPGGSLRLSCAASGFNIKDTYIHWVRQAPGKGLEWVARIYPTNGYTRYADSVKGRFTISADTSKNTAYLQMNSLRAEDTAVYYCSRWGGDGFYAMDYWGQGTLVTVSSGGGGSGGGGSGGGGSDIQMTQSPSSLSASVGDRVTITCRASQDVNTAVAWYQQKPGKAPKLLIYSASFLYSGVPSRFSGSRSGTDFTLTISSLQPEDFATYYCQQHYTTPPTFGQGTKVEIK

SEQ ID NO: 80 - protein, 874 aa, Artificial Sequence
  Description of Artificial Sequence: Synthetic polypeptide
DASLPYLQKESVFQSGAHAYRIPALLYLPGQQSLLAFAEQRASKKDEHAELIVLRRGDYDAPTHQVQWQAQEVVAQARLDGHRSMNPCPLYDAQTGTLFLFFIAIPGQVTEQQQLQTRANVTRLCQVTSTDHGRTWSSPRDLTDAAIGPAYREWSTFAVGPGHCLQLHDRARSLVVPAYAYRKLHPKQRPIPSAFCFLSHDHGRTWARGHFVAQDTLECQVAEVETGEQRVVTLNARSHLRARVQAQSTNDGLDFQESQLVKKLVEPPPAGCQGSVISFPSPRSGPGSPAQWLLYTHPTHRKQRADLGAYLNPRPPAPEAWSEPVLLAKGSAAYSDLQSMGTGPDGSPLFGCLYEANDYEEIVFLMFTLKQAFPAEYLPQGGGGSGGGGSDKTHTCPPCPAPELLGGPSVFLFPPKPKDTLMISRTPEVTCVVVDVSHEDPEVKFNWYVDGVEVHNAKTKPREEQYNSTYRVVSVLTVLHQDWLNGKEYKCKVSNKALPAPIEKTISKAKGQPREPQVYTLPPSREEMTKNQVSLTCLVKGFYPSDIAVEWESNGQPENNYKTTPPVLDSDGSFFLYSKLTVDKSRWQQGNVFSCSVMHEALHNHYTQKSLSLSPGKGGGGSGGGGSGGGGSEVQLVESGGGLVQPGGSLRLSCAASGFNIKDTYIHWVRQAPGKGLEWVARIYPTNGYTRYADSVKGRFTISADTSKNTAYLQMNSLRAEDTAVYYCSRWGGDGFYAMDYWGQGTLVTVSSGGGGSGGGGSGGGGSDIQMTQSPSSLSASVGDRVTITCRASQDVNTAVAWYQQKPGKAPKLLIYSASFLYSGVPSRFSGSRSGTDFTLTISSLQPEDFATYYCQQHYTTPPTFGQGTKVEIK

SEQ ID NO: 81 - protein, 874 aa, Artificial Sequence
  Description of Artificial Sequence: Synthetic polypeptide
DASLPYLQKESVFQSGAHAYRIPALLYLPGQQSLLAFAEQRASKKDEHAELIVLRRGDYDASTHQVQWQAQEVVAQARLDGHRSMNPCPLYDAQTGTLFLFFIAIPGQVTEQQQLQTRANVTRLCQVTSTDHGRTWSSPRDLTDAAIGPAYREWSTFAVGPGHCLQLHDRARSLVVPAYAYRKLHPKQRPIPSAFCFLSHDHGRTWARGHFVAQDTLECQVAEVETGEQRVVTLNARSHLRARVQAQSTNDGLDFQESQLVKKLVEPPPAGCQGSVISFPSPRSGPGSPAQWLLYTHPTHRKQRADLGAYLNPRPPAPEAWSEPVLLAKGSAAYSDLQSMGTGPDGSPLFGCLYEANDYEEIVFLMFTLKQAFPAEYLPQGGGGSGGGGSDKTHTCPPCPAPELLGGPSVFLFPPKPKDTLMISRTPEVTCVVVDVSHEDPEVKFNWYVDGVEVHNAKTKPREEQYNSTYRVVSVLTVLHQDWLNGKEYKCKVSNKALPAPIEKTISKAKGQPREPQVYTLPPSREEMTKNQVSLTCLVKGFYPSDIAVEWESNGQPENNYKTTPPVLDSDGSFFLYSKLTVDKSRWQQGNVFSCSVMHEALHNHYTQKSLSLSPGKGGGGSGGGGSGGGGSEVQLVESGGGLVQPGGSLRLSCAASGFNIKDTYIHWVRQAPGKGLEWVARIYPTNGYTRYADSVKGRFTISADTSKNTAYLQMNSLRAEDTAVYYCSRWGGDGFYAMDYWGQGTLVTVSSGGGGSGGGGSGGGGSDIQMTQSPSSLSASVGDRVTITCRASQDVNTAVAWYQQKPGKAPKLLIYSASFLYSGVPSRFSGSRSGTDFTLTISSLQPEDFATYYCQQHYTTPPTFGQGTKVEIK

SEQ ID NO: 82 - protein, 874 aa, Artificial Sequence
  Description of Artificial Sequence: Synthetic polypeptide
DASLPYLQKESVFQSGAHAYRIPALLYLPGQQSLLAFAEQRASKKDEHAELIVLRRGDYDATTHQVQWQAQEVVAQARLDGHRSMNPCPLYDAQTGTLFLFFIAIPGQVTEQQQLQTRANVTRLCQVTSTDHGRTWSSPRDLTDAAIGPAYREWSTFAVGPGHCLQLHDRARSLVVPAYAYRKLHPKQRPIPSAFCFLSHDHGRTWARGHFVAQDTLECQVAEVETGEQRVVTLNARSHLRARVQAQSTNDGLDFQESQLVKKLVEPPPAGCQGSVISFPSPRSGPGSPAQWLLYTHPTHRKQRADLGAYLNPRPPAPEAWSEPVLLAKGSAAYSDLQSMGTGPDGSPLFGCLYEANDYEEIVFLMFTLKQAFPAEYLPQGGGGSGGGGSDKTHTCPPCPAPELLGGPSVFLFPPKPKDTLMISRTPEVTCVVVDVSHEDPEVKFNWYVDGVEVHNAKTKPREEQYNSTYRVVSVLTVLHQDWLNGKEYKCKVSNKALPAPIEKTISKAKGQPREPQVYTLPPSREEMTKNQVSLTCLVKGFYPSDIAVEWESNGQPENNYKTTPPVLDSDGSFFLYSKLTVDKSRWQQGNVFSCSVMHEALHNHYTQKSLSLSPGKGGGGSGGGGSGGGGSEVQLVESGGGLVQPGGSLRLSCAASGFNIKDTYIHWVRQAPGKGLEWVARIYPTNGYTRYADSVKGRFTISADTSKNTAYLQMNSLRAEDTAVYYCSRWGGDGFYAMDYWGQGTLVTVSSGGGGSGGGGSGGGGSDIQMTQSPSSLSASVGDRVTITCRASQDVNTAVAWYQQKPGKAPKLLIYSASFLYSGVPSRFSGSRSGTDFTLTISSLQPEDFATYYCQQHYTTPPTFGQGTKVEIK

SEQ ID NO: 83 - protein, 874 aa, Artificial Sequence
  Description of Artificial Sequence: Synthetic polypeptide
DASLPYLQKESVFQSGAHAYRIPALLYLPGQQSLLAFAEQRASKKDEHAELIVLRRGDYDANTHQVQWQAQEVVAQARLDGHRSMNPCPLYDAQTGTLFLFFIAIPGQVTEQQQLQTRANVTRLCQVTSTDHGRTWSSPRDLTDAAIGPAYREWSTFAVGPGHCLQLHDRARSLVVPAYAYRKLHPKQRPIPSAFCFLSHDHGRTWARGHFVAQDTLECQVAEVETGEQRVVTLNARSHLRARVQAQSTNDGLDFQESQLVKKLVEPPPAGCQGSVISFPSPRSGPGSPAQWLLYTHPTHRKQRADLGAYLNPRPPAPEAWSEPVLLAKGSAAYSDLQSMGTGPDGSPLFGCLYEANDYEEIVFLMFTLKQAFPAEYLPQGGGGSGGGGSDKTHTCPPCPAPELLGGPSVFLFPPKPKDTLMISRTPEVTCVVVDVSHEDPEVKFNWYVDGVEVHNAKTKPREEQYNSTYRVVSVLTVLHQDWLNGKEYKCKVSNKALPAPIEKTISKAKGQPREPQVYTLPPSREEMTKNQVSLTCLVKGFYPSDIAVEWESNGQPENNYKTTPPVLDSDGSFFLYSKLTVDKSRWQQGNVFSCSVMHEALHNHYTQKSLSLSPGKGGGGSGGGGSGGGGSEVQLVESGGGLVQPGGSLRLSCAASGFNIKDTYIHWVRQAPGKGLEWVARIYPTNGYTRYADSVKGRFTISADTSKNTAYLQMNSLRAEDTAVYYCSRWGGDGFYAMDYWGQGTLVTVSSGGGGSGGGGSGGGGSDIQMTQSPSSLSASVGDRVTITCRASQDVNTAVAWYQQKPGKAPKLLIYSASFLYSGVPSRFSGSRSGTDFTLTISSLQPEDFATYYCQQHYTTPPTFGQGTKVEIK

SEQ ID NO: 84 - protein, 874 aa, Artificial Sequence
  Description of Artificial Sequence: Synthetic polypeptide
  MOD_RES (1)..(1): Ala, Arg, Asn, Asp, Gln, Glu, Gly, His, Leu, Lys, Met, Phe, Thr, Val, or not present
  MOD_RES (6)..(6): Phe, Trp, Tyr or Val
  MOD_RES (9)..(9): Lys or Asp
  MOD_RES (62)..(62): Pro, Asn, Asp, His, Glu, Gly, Ser or Thr
  MOD_RES (93)..(93): Ala, Glu, or Lys
  MOD_RES (187)..(187): Arg, Ile, or Lys
  MOD_RES (270)..(270): Gln, Ala, His, Phe, or Pro
  MOD_RES (301)..(301): Ser or Arg
  MOD_RES (302)..(302): Trp or Lys
  MOD_RES (332)..(332): Ala, Cys, Ser, or Val
  MOD_RES (363)..(363): Val or Arg
  MOD_RES (365)..(365): Leu, Gln, His, Ile, Lys, or Ser
XASLPXLQXESVFQSGAHAYRIPALLYLPGQQSLLAFAEQRASKKDEHAELIVLRRGDYDAXTHQVQWQAQEVVAQARLDGHRSMNPCPLYDXQTGTLFLFFIAIPGQVTEQQQLQTRANVTRLCQVTSTDHGRTWSSPRDLTDAAIGPAYREWSTFAVGPGHCLQLHDRARSLVVPAYAYRKLHPXQRPIPSAFCFLSHDHGRTWARGHFVAQDTLECQVAEVETGEQRVVTLNARSHLRARVQAQSTNDGLDFQESQLVKKLVEPPPXGCQGSVISFPSPRSGPGSPAQWLLYTHPTHXXQRADLGAYLNPRPPAPEAWSEPVLLAKGSXAYSDLQSMGTGPDGSPLFGCLYEANDYEEIXFXMFTLKQAFPAEYLPQGGGGSGGGGSDKTHTCPPCPAPELLGGPSVFLFPPKPKDTLMISRTPEVTCVVVDVSHEDPEVKFNWYVDGVEVHNAKTKPREEQYNSTYRVVSVLTVLHQDWLNGKEYKCKVSNKALPAPIEKTISKAKGQPREPQVYTLPPSREEMTKNQVSLTCLVKGFYPSDIAVEWESNGQPENNYKTTPPVLDSDGSFFLYSKLTVDKSRWQQGNVFSCSVMHEALHNHYTQKSLSLSPGKGGGGSGGGGSGGGGSEVQLVESGGGLVQPGGSLRLSCAASGFNIKDTYIHWVRQAPGKGLEWVARIYPTNGYTRYADSVKGRFTISADTSKNTAYLQMNSLRAEDTAVYYCSRWGGDGFYAMDYWGQGTLVTVSSGGGGSGGGGSGGGGSDIQMTQSPSSLSASVGDRVTITCRASQDVNTAVAWYQQKPGKAPKLLIYSASFLYSGVPSRFSGSRSGTDFTLTISSLQPEDFATYYCQQHYTTPPTFGQGTKVEIK

SEQ ID NO: 85 - protein, 874 aa, Artificial Sequence
  Description of Artificial Sequence: Synthetic polypeptide
  MOD_RES (1)..(1): Ala, Arg, Asn, Asp, Gln, Glu, Gly, His, Leu, Lys, Met, Phe, Thr, Val, or not present
  MOD_RES (2)..(2): Ala or Lys
  MOD_RES (4)..(4): Asn or Leu
  MOD_RES (5)..(5): Pro or His
  MOD_RES (6)..(6): Phe, Trp, Tyr or Val
  MOD_RES (9)..(9): Lys or Asp
  MOD_RES (44)..(44): Lys, Arg, or Glu
  MOD_RES (45)..(45): Lys, Ala, Arg, or Glu
  MOD_RES (54)..(54): Leu or Met
  MOD_RES (62)..(62): Pro, Asn, Asp, His, Glu, Gly, Ser or Thr
  MOD_RES (69)..(69): Gln or His
  MOD_RES (78)..(78): Arg or Lys
  MOD_RES (93)..(93): Ala, Glu or Lys
  MOD_RES (107)..(107): Gly or Asp
  MOD_RES (108)..(108): Gln or His
  MOD_RES (112)..(112): Gln, Arg, or Lys
  MOD_RES (125)..(125): Ala, Cys, Ile, Ser, Val, or Leu
  MOD_RES (126)..(126): Gln or Leu
  MOD_RES (150)..(150): Ala or Val
  MOD_RES (164)..(164): Cys or Gly
  MOD_RES (171)..(171): Ala or Gly
  MOD_RES (187)..(187): Arg, Ile, or Lys
  MOD_RES (196)..(196): Ala, Cys, Leu, or Val
  MOD_RES (217)..(217): Leu, Ala, or Val
  MOD_RES (249)..(249): Thr or Ala
  MOD_RES (251)..(251): Asp or Gly
  MOD_RES (257)..(257): Glu or Lys
  MOD_RES (270)..(270): Gln, Ala, His, Phe, or Pro
  MOD_RES (272)..(272): Cys or Val
  MOD_RES (292)..(292): Trp or Arg
  MOD_RES (301)..(301): Ser or Arg
  MOD_RES (302)..(302): Trp or Lys
  MOD_RES (325)..(325): Lys or Val
  MOD_RES (332)..(332): Ala, Cys, Ser, or Val
  MOD_RES (352)..(352): Cys, Leu, or Val
  MOD_RES (363)..(363): Val or Arg
  MOD_RES (365)..(365): Leu, Gln, His, Ile, Lys, or Ser
XXSXXXLQXESVFQSGAHAYRIPALLYLPGQQSLLAFAEQRASXXDEHAELIVXRRGDYDAXTHQVQWXAQEVVAQAXLDGHRSMNPCPLYDXQTGTLFLFFIAIPXXVTEXQQLQTRANVTRLXXVTSTDHGRTWSSPRDLTDAAIGPXYREWSTFAVGPGHXLQLHDRXRSLVVPAYAYRKLHPXQRPIPSAFXFLSHDHGRTWARGHFVAQDTXECQVAEVETGEQRVVTLNARSHLRARVQAQSXNXGLDFQXSQLVKKLVEPPPXGXQGSVISFPSPRSGPGSPAQXLLYTHPTHXXQRADLGAYLNPRPPAPEAWSEPXLLAKGSXAYSDLQSMGTGPDGSPLFGXLYEANDYEEIXFXMFTLKQAFPAEYLPQGGGGSGGGGSDKTHTCPPCPAPELLGGPSVFLFPPKPKDTLMISRTPEVTCVVVDVSHEDPEVKFNWYVDGVEVHNAKTKPREEQYNSTYRVVSVLTVLHQDWLNGKEYKCKVSNKALPAPIEKTISKAKGQPREPQVYTLPPSREEMTKNQVSLTCLVKGFYPSDIAVEWESNGQPENNYKTTPPVLDSDGSFFLYSKLTVDKSRWQQGNVFSCSVMHEALHNHYTQKSLSLSPGKGGGGSGGGGSGGGGSEVQLVESGGGLVQPGGSLRLSCAASGFNIKDTYIHWVRQAPGKGLEWVARIYPTNGYTRYADSVKGRFTISADTSKNTAYLQMNSLRAEDTAVYYCSRWGGDGFYAMDYWGQGTLVTVSSGGGGSGGGGSGGGGSDIQMTQSPSSLSASVGDRVTITCRASQDVNTAVAWYQQKPGKAPKLLIYSASFLYSGVPSRFSGSRSGTDFTLTISSLQPEDFATYYCQQHYTTPPTFGQGTKVEIK

SEQ ID NO: 86 - DNA, 642 bp, Artificial Sequence
  Description of Artificial Sequence: Synthetic polynucleotide
gacatccagatgacacagagccctagcagcctgtctgccagcgtgggagacagagtgaccatcacctgtagagccagccaggacgtgaacacagccgtggcttggtatcagcagaagcctggcaaggcccctaagctgctgatctacagcgccagctttctgtactccggcgtgcccagcagattcagcggctctagaagcggcaccgacttcaccctgaccataagcagtctgcagcccgaggacttcgccacctactactgtcagcagcactacaccacacctccaacctttggccagggcaccaaggtggaaatcaagcgtacggtggctgcaccatctgtcttcatcttcccgccatctgatgagcagttgaaatctggaactgcctctgttgtgtgcctgctgaataacttctatcccagagaggccaaagtacagtggaaggtggataacgccctccaatcgggtaactcccaggagagtgtcacagagcaggacagcaaggacagcacctacagcctcagcagcaccctgacgctgagcaaagcagactacgagaaacacaaagtctacgcctgcgaagtcacccatcagggcctgagctcgcccgtcacaaagagcttcaacaggggagagtgt

SEQ ID NO: 87 - DNA, 1350 bp, Artificial Sequence
  Description of Artificial Sequence: Synthetic polynucleotide
gaggtgcagctggttgaatctggcggaggactggttcagcctggcggatctctgagactgtcttgtgccgccagcggcttcaacatcaaggacacctacatccactgggtccgacaggcccctggcaaaggacttgaatgggtcgccagaatctaccccaccaacggctacaccagatacgccgactctgtgaagggcagattcaccatcagcgccgacaccagcaagaacaccgcctacctgcagatgaacagcctgagagccgaggacaccgccgtgtactactgttctagatggggaggcgacggcttctacgccatggattattggggccagggcaccctggtcaccgtttcttctgctagcaccaagggcccatccgtcttccccctggcaccctcctccaagagcacctctgggggcacagcggccctgggctgcctggtcaaggactacttccccgaaccggtgacggtgtcctggaactcaggcgctctgaccagcggcgtgcacaccttcccggctgtcctacagtcctcaggactctactccctcagcagcgtggtgaccgtgccctccagcagcttgggcacccagacctacatctgcaacgtgaatcacaagcccagcaacaccaaggtggacaagaaagttgagcccaaatcttgtgacaaaactcacacatgcccaccgtgcccagcacctgaactcctggggggaccgtcagtcttcctcttccccccaaaacccaaggacaccctcatgatctcccggacccctgaggtcacatgcgtggtggtggacgtgagccacgaagaccctgaggtcaagttcaactggtacgtggacggcgtggaggtgcataatgccaagacaaagccgcgggaggagcagtacaacagcacgtaccgtgtggtcagcgtcctcaccgtcctgcaccaggactggctgaatggcaaggagtacaagtgcaaggtctccaacaaagccctcccagcccccatcgagaaaaccatctccaaagccaaagggcagccccgagaaccacaggtctacaccctgcccccatcccgggaggagatgaccaagaaccaggtcagcctgtactgcctggtcaaaggcttctatcccagcgacatcgccgtggagtgggagagcaatgggcagccggagaacaactacaagaccacgcctcccgtgctggactccgacggctccttcttcctctatagcaagctcaccgtggacaagagcaggtggcagcaggggaacgtcttctcatgctccgtgatgcatgaggctctgcacaaccactacacgcagaagagcctctccctgtctccgggtaaa

SEQ ID NO: 88 - DNA, 1851 bp, Artificial Sequence
  Description of Artificial Sequence: Synthetic polynucleotide
gatgcatctctgccttacctgcagaaagaaagcgtgttccagtctggcgcccacgcctacagaattcccgctctgctgtatctgccaggccagcagtctctgctggctttcgctgaacagcgggccagcaagaaggatgagcacgccgaactgatcgtgctgcggagaggcgattacgacgccggcacacatcaggtgcagtggcaggctcaagaggtggtggctcaggctagactggacggccacagatctatgaacccctgtcctctgtacgatgaacagaccggcacactgtttctgttctttatcgctatccccggccaagtgaccgagcagcagcagctgcagacaagagccaacgtgaccagactgtgtcaagtgacctccaccgaccacggcagaacctggtctagccctagagatctgaccgacgccgccatcggacctgcctatagagagtggtccaccttcgccgttggacctggacactgtctccagctgcacgacagggctagatctctggtggtgcctgcctacgcctatagaaagctgcaccccaaacagcggcctattcctagcgccttctgctttctgagccacgatcacggcaggacatgggccagaggacatttcgtggcccaggacacactggaatgccaggtggccgaagtggaaaccggcgagcagagagtcgtgaccctgaacgccagatctcacctgagagccagagtgcaggcccagagcacaaacgacggcctggatttccaagagagccagctggtcaagaaactggtggaacctcctccacagggctgtcagggaagcgtgatcagctttccatctcctagaagcggccctggctctcctgctcagtggctgctgtatacacaccccacacacagctggcagagagccgatctgggcgcctacctgaatcctagacctcctgctcctgaggcttggagcgaacctgttctgctggccaagggcagcgctgcctacagcgatctgcagtctatgggcacaggccctgatggcagccctctgtttggctgtctgtacgaggccaacgactacgaagagatcgtgttcctgatgttcaccctgaagcaggcctttccagccgagtacctgcctcaaggcggaggtggaagtggcggaggcggatccgacaaaactcacacatgcccaccgtgcccagcacctgaactcctggggggaccgtcagtcttcctcttccccccaaaacccaaggacaccctcatgatctcccggacccctgaggtcacatgcgtggtggtggacgtgagccacgaagaccctgaggtcaagttcaactggtacgtggacggcgtggaggtgcataatgccaagacaaagccgcgggaggagcagtacaacagcacgtaccgtgtggtcagcgtcctcaccgtcctgcaccaggactggctgaatggcaaggagtacaagtgcaaggtctccaacaaagccctcccagcccccatcgagaaaaccatctccaaagccaaagggcagccccgagaaccacaggtctacaccctgcccccatcccgggaggagatgaccaagaaccaggtcagcctgacctgcctggtcaaaggcttctatcccagcgacatcgccgtggagtgggagagcaatgggcagccggagaacaactacaagaccacgcctcccgtgctggactccgacggctccttcttcctcactagcaagctcaccgtggacaagagcaggtggcagcaggggaacgtcttctcatgctccgtgatgcatgaggctctgcacaaccactacacgcagaagagcctctccctgtctccgggtaaa

SEQ ID NO: 89 - DNA, 1140 bp, Artificial Sequence
  Description of Artificial Sequence: Synthetic polynucleotide
gatgcatctctgccttacctgcagaaagaaagcgtgttccagtctggcgcccacgcctacagaattcccgctctgctgtatctgccaggccagcagtctctgctggctttcgctgaacagcgggccagcaagaaggatgagcacgccgaactgatcgtgctgcggagaggcgattacgacgccggcacacatcaggtgcagtggcaggctcaagaggtggtggctcaggctagactggacggccacagatctatgaacccctgtcctctgtacgatgaacagaccggcacactgtttctgttctttatcgctatccccggccaagtgaccgagcagcagcagctgcagacaagagccaacgtgaccagactgtgtcaagtgacctccaccgaccacggcagaacctggtctagccctagagatctgaccgacgccgccatcggacctgcctatagagagtggtccaccttcgccgttggacctggacactgtctccagctgcacgacagggctagatctctggtggtgcctgcctacgcctatagaaagctgcaccccaaacagcggcctattcctagcgccttctgctttctgagccacgatcacggcaggacatgggccagaggacatttcgtggcccaggacacactggaatgccaggtggccgaagtggaaaccggcgagcagagagtcgtgaccctgaacgccagatctcacctgagagccagagtgcaggcccagagcacaaacgacggcctggatttccaagagagccagctggtcaagaaactggtggaacctcctccacagggctgtcagggaagcgtgatcagctttccatctcctagaagcggccctggctctcctgctcagtggctgctgtatacacaccccacacacagctggcagagagccgatctgggcgcctacctgaatcctagacctcctgctcctgaggcttggagcgaacctgttctgctggccaagggcagcgctgcctacagcgatctgcagtctatgggcacaggccctgatggcagccctctgtttggctgtctgtacgaggccaacgactacgaagagatcgtgttcctgatgttcaccctgaagcaggcctttccagccgagtacctgcctcaa

SEQ ID NO: 90 - protein, 618 aa, Artificial Sequence
  Description of Artificial Sequence: Synthetic polypeptide
TVEKSVVFKAEGEHFTDQKGNTIVGSGSGGTTKYFRIPAMCTTSKGTIVVFADARHNTASDQSFIDTAAARSTDGGKTWNKKIAIYNDRVNSKLSRVMDPTCIVANIQGRETILVMVGKWNNNDKTWGAYRDKAPDTDWDLVLYKSTDDGVTFSKVETNIHDIVTKNGTISAMLGGVGSGLQLNDGKLVFPVQMVRTKNITTVLNTSFIYSTDGITWSLPSGYCEGFGSENNIIEFNASLVNNIRNSGLRRSFETKDFGKTWTEFPPMDKKVDNRNHGVQGSTITIPSGNKLVAAHSSAQNKNNDYTRSDISLYAHNLYSGEVKLIDDFYPKVGNASGAGYSCLSYRKNVDKETLYVVYEANGSIEFQDLSRHLPVIKSYNGGGGSGGGGSDKTHTCPPCPAPELLGGPSVFLFPPKPKDTLMISRTPEVTCVVVDVSHEDPEVKFNWYVDGVEVHNAKTKPREEQYNSTYRVVSVLTVLHQDWLNGKEYKCKVSNKALPAPIEKTISKAKGQPREPQVYTLPPSREEMTKNQVSLTCLVKGFYPSDIAVEWESNGQPENNYKTTPPVLDSDGSFFLTSKLTVDKSRWQQGNVFSCSVMHEALHNHYTQKSLSLSPGK

SEQ ID NO: 91 - DNA, 1854 bp, Artificial Sequence
  Description of Artificial Sequence: Synthetic polynucleotide
acagtggaaaagtccgtggtgttcaaggccgagggcgagcacttcaccgaccagaaaggcaataccatcgtcggctctggcagcggcggcaccaccaagtactttagaatccccgccatgtgcaccaccagcaagggcaccattgtggtgttcgccgacgccagacacaacaccgccagcgatcagagcttcatcgataccgctgccgccagatctaccgatggcggcaagacctggaacaagaagatcgccatctacaacgaccgcgtgaacagcaagctgagcagagtgatggaccctacctgcatcgtggccaacatccagggcagagaaaccatcctggtcatggtcggaaagtggaacaacaacgataagacctggggcgcctacagagacaaggcccctgataccgattgggacctcgtgctgtacaagagcaccgatgacggcgtgaccttcagcaaggtggaaacaaacatccacgacatcgtgaccaagaacggcaccatctctgccatgctcggcggcgttggatctggcctgcaactgaatgatggcaagctggtgttccccgtgcagatggtccgaacaaagaatatcaccaccgtgctgaataccagcttcatctacagcaccgacggcatcacatggtccctgcctagcggctactgtgaaggctttggcagcgagaacaacatcatcgagttcaacgccagcctggtcaacaacatccggaacagcggcctgcggagaagcttcgagacaaaggacttcggaaagacgtggaccgagtttcctccaatggacaagaaggtggacaaccggaaccacggcgtgcagggcagcacaatcacaatccctagcggcaacaaactggtggccgctcactctagcgcccagaacaagaacaacgactacaccagaagcgacatcagcctgtacgcccacaacctgtacagcggcgaagtgaagctgatcgacgacttctaccccaaagtgggcaatgccagcggagccggctacagctgtctgagctaccggaaaaatgtggacaaagaaaccctgtacgtggtgtacgaggccaacggcagcatcgagtttcaggacctgagcagacatctgcccgtgatcaagagctacaacggcggaggtggaagtggcggaggcggatccgacaaaactcacacatgcccaccgtgcccagcacctgaactcctggggggaccgtcagtcttcctcttccccccaaaacccaaggacaccctcatgatctcccggacccctgaggtcacatgcgtggtggtggacgtgagccacgaagaccctgaggtcaagttcaactggtacgtggacggcgtggaggtgcataatgccaagacaaagccgcgggaggagcagtacaacagcacgtaccgtgtggtcagcgtcctcaccgtcctgcaccaggactggctgaatggcaaggagtacaagtgcaaggtctccaacaaagccctcccagcccccatcgagaaaaccatctccaaagccaaagggcagccccgagaaccacaggtctacaccctgcccccatcccgggaggagatgaccaagaaccaggtcagcctgacctgcctggtcaaaggcttctatcccagcgacatcgccgtggagtgggagagcaatgggcagccggagaacaactacaagaccacgcctcccgtgctggactccgacggctccttcttcctcactagcaagctcaccgtggacaagagcaggtggcagcaggggaacgtcttctcatgctccgtgatgcatgaggctctgcacaaccactacacgcagaagagcctctccctgtctccgggtaaa

SEQ ID NO: 92 - protein, 846 aa, Artificial Sequence
  Description of Artificial Sequence: Synthetic polypeptide
EVQLVESGGGLVQPGGSLRLSCAASGFNIKDTYIHWVRQAPGKGLEWVARIYPTNGYTRYADSVKGRFTISADTSKNTAYLQMNSLRAEDTAVYYCSRWGGDGFYAMDYWGQGTLVTVSSASTKGPSVFPLAPSSKSTSGGTAALGCLVKDYFPEPVTVSWNSGALTSGVHTFPAVLQSSGLYSLSSVVTVPSSSLGTQTYICNVNHKPSNTKVDKKVEPKSCDKTHTCPPCPAPELLGGPSVFLFPPKPKDTLMISRTPEVTCVVVDVSHEDPEVKFNWYVDGVEVHNAKTKPREEQYNSTYRVVSVLTVLHQDWLNGKEYKCKVSNKALPAPIEKTISKAKGQPREPQVYTLPPSREEMTKNQVSLTCLVKGFYPSDIAVEWESNGQPENNYKTTPPVLDSDGSFFLYSKLTVDKSRWQQGNVFSCSVMHEALHNHYTQKSLSLSPGKGGGGSGGGGSGGGGSTVEKSVVFKAEGEHFTDQKGNTIVGSGSGGTTKYFRIPAMCTTSKGTIVVFADARHNTASDQSFIDTAAARSTDGGKTWNKKIAIYNDRVNSKLSRVMDPTCIVANIQGRETILVMVGKWNNNDKTWGAYRDKAPDTDWDLVLYKSTDDGVTFSKVETNIHDIVTKNGTISAMLGGVGSGLQLNDGKLVFPVQMVRTKNITTVLNTSFIYSTDGITWSLPSGYCEGFGSENNIIEFNASLVNNIRNSGLRRSFETKDFGKTWTEFPPMDKKVDNRNHGVQGSTITIPSGNKLVAAHSSAQNKNNDYTRSDISLYAHNLYSGEVKLIDDFYPKVGNASGAGYSCLSYRKNVDKETLYVVYEANGSIEFQDLSRHLPVIKSYN

SEQ ID NO: 93 - DNA, 2538 bp, Artificial Sequence
  Description of Artificial Sequence: Synthetic polynucleotide
gaggtgcagctggttgaatctggcggaggactggttcagcctggcggatctctgagactgtcttgtgccgccagcggcttcaacatcaaggacacctacatccactgggtccgacaggcccctggcaaaggacttgaatgggtcgccagaatctaccccaccaacggctacaccagatacgccgactctgtgaagggcagattcaccatcagcgccgacaccagcaagaacaccgcctacctgcagatgaacagcctgagagccgaggacaccgccgtgtactactgttctagatggggaggcgacggcttctacgccatggattattggggccagggcaccctggtcaccgtttcttctgctagcaccaagggcccatccgtcttccccctggcaccctcctccaagagcacctctgggggcacagcggccctgggctgcctggtcaaggactacttccccgaaccggtgacggtgtcctggaactcaggcgctctgaccagcggcgtgcacaccttcccggctgtcctacagtcctcaggactctactccctcagcagcgtggtgaccgtgccctccagcagcttgggcacccagacctacatctgcaacgtgaatcacaagcccagcaacaccaaggtggacaagaaagttgagcccaaatcttgtgacaaaactcacacatgcccaccgtgcccagcacctgaactcctggggggaccgtcagtcttcctcttccccccaaaacccaaggacaccctcatgatctcccggacccctgaggtcacatgcgtggtggtggacgtgagccacgaagaccctgaggtcaagttcaactggtacgtggacggcgtggaggtgcataatgccaagacaaagccgcgggaggagcagtacaacagcacgtaccgtgtggtcagcgtcctcaccgtcctgcaccaggactggctgaatggcaaggagtacaagtgcaaggtctccaacaaagccctcccagcccccatcgagaaaaccatctccaaagccaaagggcagccccgagaaccacaggtctacaccctgcccccatcccgggaggagatgaccaagaaccaggtcagcctgacctgcctggtcaaaggcttctatcccagcgacatcgccgtggagtgggagagcaatgggcagccggagaacaactacaagaccacgcctcccgtgctggactccgacggctccttcttcctctatagcaagctcaccgtggacaagagcaggtggcagcaggggaacgtcttctcatgctccgtgatgcatgaggctctgcacaaccactacacgcagaagagcctctccctgtctccgggtaaaggtggcggaggatctggcggaggtggaagcggcggaggcggatctacagtggaaaagtccgtggtgttcaaggccgagggcgagcacttcaccgaccagaaaggcaataccatcgtcggctctggcagcggcggcaccaccaagtactttagaatccccgccatgtgcaccaccagcaagggcaccattgtggtgttcgccgacgccagacacaacaccgccagcgatcagagcttcatcgataccgctgccgccagaagtacagacggcggcaagacctggaacaagaagatcgccatctacaacgaccgcgtgaacagcaagctgagcagagtgatggaccctacctgcatcgtggccaacatccagggcagagaaaccatcctggtcatggtcggaaagtggaacaacaacgataagacctggggcgcctacagagacaaggcccctgataccgattgggacctcgtgctgtataagagcaccgacgacggcgtgaccttcagcaaggtggaaacaaacatccacgacatcgtgaccaagaacggcaccatctctgccatgctcggcggcgttggatctggcctgcaactgaatgatggcaagctggtgttccccgtgcagatggtccgaacaaagaacatcaccaccgtgctgaataccagcttcatctactccaccgacggcatcacatggtccctgcctagcggctactgtgaaggctttggcagcgagaacaacatcatcgagttcaacgccagcctggtcaacaacatccggaacagcggcctgcggagaagcttcgagacaaaggacttcggaaagacgtggaccgagtttcctccaatggacaagaaggtggacaaccggaaccacggcgtgcagggcagcacaatcacaatccctagcggcaacaaactggtggccgctcactctagcgcccagaacaagaacaacgattacaccagaagcgacatcagcctgtacgcccacaacctgtactccggcgaagtgaagctgatcgacgacttctaccccaaagtgggcaatgccagcggagccggctacagctgtctgagctaccggaaaaatgtggacaaagaaaccctgtacgtggtgtacgaggccaacggcagcatcgagtttcaggacctgagcagacatctgcccgtgatcaagagctacaat

SEQ ID NO: 94 - protein, 875 aa, Artificial Sequence
  Description of Artificial Sequence: Synthetic polypeptide
TVEKSVVFKAEGEHFTDQKGNTIVGSGSGGTTKYFRIPAMCTTSKGTIVVFADARHNTASDQSFIDTAAARSTDGGKTWNKKIAIYNDRVNSKLSRVMDPTCIVANIQGRETILVMVGKWNNNDKTWGAYRDKAPDTDWDLVLYKSTDDGVTFSKVETNIHDIVTKNGTISAMLGGVGSGLQLNDGKLVFPVQMVRTKNITTVLNTSFIYSTDGITWSLPSGYCEGFGSENNIIEFNASLVNNIRNSGLRRSFETKDFGKTWTEFPPMDKKVDNRNHGVQGSTITIPSGNKLVAAHSSAQNKNNDYTRSDISLYAHNLYSGEVKLIDDFYPKVGNASGAGYSCLSYRKNVDKETLYVVYEANGSIEFQDLSRHLPVIKSYNGGGGSGGGGSDKTHTCPPCPAPELLGGPSVFLFPPKPKDTLMISRTPEVTCVVVDVSHEDPEVKFNWYVDGVEVHNAKTKPREEQYNSTYRVVSVLTVLHQDWLNGKEYKCKVSNKALPAPIEKTISKAKGQPREPQVYTLPPSREEMTKNQVSLTCLVKGFYPSDIAVEWESNGQPENNYKTTPPVLDSDGSFFLYSKLTVDKSRWQQGNVFSCSVMHEALHNHYTQKSLSLSPGKGGGGSGGGGSGGGGSEVQLVESGGGLVQPGGSLRLSCAASGFNIKDTYIHWVRQAPGKGLEWVARIYPTNGYTRYADSVKGRFTISADTSKNTAYLQMNSLRAEDTAVYYCSRWGGDGFYAMDYWGQGTLVTVSSGGGGSGGGGSGGGGSDIQMTQSPSSLSASVGDRVTITCRASQDVNTAVAWYQQKPGKAPKLLIYSASFLYSGVPSRFSGSRSGTDFTLTISSLQPEDFATYYCQQHYTTPPTFGQGTKVEIK

SEQ ID NO: 95 - DNA, 2625 bp, Artificial Sequence
  Description of Artificial Sequence: Synthetic polynucleotide
acagtggaaaagtccgtggtgttcaaggccgagggcgagcacttcaccgaccagaaaggcaataccatcgtcggctctggcagcggcggcaccaccaagtactttagaatccccgccatgtgcaccaccagcaagggcaccattgtggtgttcgccgacgccagacacaacaccgccagcgatcagagcttcatcgataccgctgccgccagatctaccgatggcggcaagacctggaacaagaagatcgccatctacaacgaccgcgtgaacagcaagctgagcagagtgatggaccctacctgcatcgtggccaacatccagggcagagaaaccatcctggtcatggtcggaaagtggaacaacaacgataagacctggggcgcctacagagacaaggcccctgataccgattgggacctcgtgctgtacaagagcaccgatgacggcgtgaccttcagcaaggtggaaacaaacatccacgacatcgtgaccaagaacggcaccatctctgccatgctcggcggcgttggatctggcctgcaactgaatgatggcaagctggtgttccccgtgcagatggtccgaacaaagaatatcaccaccgtgctgaataccagcttcatctacagcaccgacggcatcacatggtccctgcctagcggctactgtgaaggctttggcagcgagaacaacatcatcgagttcaacgccagcctggtcaacaacatccggaacagcggcctgcggagaagcttcgagacaaaggacttcggaaagacgtggaccgagtttcctccaatggacaagaaggtggacaaccggaaccacggcgtgcagggcagcacaatcacaatccctagcggcaacaaactggtggccgctcactctagcgcccagaacaagaacaacgactacaccagaagcgacatcagcctgtacgcccacaacctgtacagcggcgaagtgaagctgatcgacgacttctaccccaaagtgggcaatgccagcggagccggctacagctgtctgagctaccggaaaaatgtggacaaagaaaccctgtacgtggtgtacgaggccaacggcagcatcgagtttcaggacctgagcagacatctgcccgtgatcaagagctacaacggcggaggtggaagtggcggaggcggatccgacaaaactcacacatgcccaccgtgcccagcacctgaactcctggggggaccgtcagtcttcctcttccccccaaaacccaaggacaccctcatgatctcccggacccctgaggtcacatgcgtggtggtggacgtgagccacgaagaccctgaggtcaagttcaactggtacgtggacggcgtggaggtgcataatgccaagacaaagccgcgggaggagcagtacaacagcacgtaccgtgtggtcagcgtcctcaccgtcctgcaccaggactggctgaatggcaaggagtacaagtgcaaggtctccaacaaagccctcccagcccccatcgagaaaaccatctccaaagccaaagggcagccccgagaaccacaggtctacaccctgcccccatcccgggaggagatgaccaagaaccaggtcagcctgacctgcctggtcaaaggcttctatcccagcgacatcgccgtggagtgggagagcaatgggcagccggagaacaactacaagaccacgcctcccgtgctggactccgacggctccttcttcctctatagcaagctcaccgtggacaagagcaggtggcagcaggggaacgtcttctcatgctccgtgatgcatgaggctctgcacaaccactacacgcagaagagcctctccctgtctccgggtaaaggaggcggaggatctggcggaggtggaagtggcggaggcggatctgaggtgcagctggttgaatctggcggaggactggttcagcctggcggatctctgagactgtcttgtgccgccagcggcttcaacatcaaggacacctacatccactgggtccgacaggcccctggcaaaggacttgaatgggtcgccagaatctaccccaccaacggctacaccagatacgccgactctgtgaagggcagattcaccatcagcgccgacaccagcaagaacaccgcctacctgcagatgaacagcctgagagccgaggacaccgccgtgtactactgttctagatggggaggcgacggcttctacgccatggattattggggccagggcaccctggtcaccgtttcttctggcggaggaggatctggcggaggcggaagtggcggaggcggatctgacatccagatgacacagagccctagcagcctgtctgccagcgtgggagacagagtgaccatcacctgtagagccagccaggacgtgaacacagccgtggcttggtatcagcagaagcctggcaaggcccctaagctgctgatctacagcgccagctttctgtactccggcgtgcccagcagattcagcggctctagaagcggcaccgacttcaccctgaccataagcagtctgcagcccgaggacttcgccacctactactgtcagcagcactacaccacacctccaacctttggccagggcaccaaggtggaaatcaag

SEQ ID NO: 96 - protein, 618 aa, Artificial Sequence
  Description of Artificial Sequence: Synthetic polypeptide
TVEKSVVFKAEGEHFTDQKGNTIVGSGSGGTTKYFRIPAMCTTSKGTIVVFADARHNTASDQSFIDTAAARSTDGGKTWNKKIAIYNDRVNSKLSRVMVPTCIVANIQGRETILVMVGKWNNNDKTWGAYRDKAPDTDWDLVLYKSTDDGVTFSKVETNIHDIVTKNGTISAMLGGVGSGLQLNDGKLVFPVQMVRTKNITTVLNTSFIYSTDGITWSLPSGYCEGFGSVNNIIEFNASLVNNIRNSGLRRSFETKDFGKTWTEFPPMDKKVDNRNHGVQGSTITIPSGNKLVAAHSSAQNKNNDYTRSDISLYAHNLYSGEVKLIDDFYPKVGNASGAGYSCLSYRKNVDKETLYVVYEANGSIEFQDLSRHLPVIKSYNGGGGSGGGGSDKTHTCPPCPAPELLGGPSVFLFPPKPKDTLMISRTPEVTCVVVDVSHEDPEVKFNWYVDGVEVHNAKTKPREEQYNSTYRVVSVLTVLHQDWLNGKEYKCKVSNKALPAPIEKTISKAKGQPREPQVYTLPPSREEMTKNQVSLTCLVKGFYPSDIAVEWESNGQPENNYKTTPPVLDSDGSFFLTSKLTVDKSRWQQGNVFSCSVMHEALHNHYTQKSLSLSPGK

SEQ ID NO: 97 - DNA, 1854 bp, Artificial Sequence
  Description of Artificial Sequence: Synthetic polynucleotide
acagtggaaaagtccgtggtgttcaaggccgagggcgagcacttcaccgaccagaaaggcaataccatcgtcggctctggcagcggcggcaccaccaagtactttagaatccccgccatgtgcaccaccagcaagggcaccattgtggtgttcgccgacgccagacacaacaccgccagcgatcagagcttcatcgataccgctgccgccagaagtacagacggcggcaagacctggaacaagaagatcgccatctacaacgaccgcgtgaacagcaagctgagcagagtgatggtccctacctgcatcgtggccaacatccagggcagagaaaccatcctggtcatggtcggaaagtggaacaacaacgataagacctggggcgcctacagagacaaggcccctgataccgattgggacctcgtgctgtataagagcaccgacgacggcgtgaccttcagcaaggtggaaacaaacatccacgacatcgtgaccaagaacggcaccatctctgccatgctcggcggcgttggatctggcctgcaactgaatgatggcaagctggtgttccccgtgcagatggtccgaacaaagaacatcaccaccgtgctgaataccagcttcatctactccaccgacggcatcacatggtccctgcctagcggctactgtgaaggctttggcagcgtgaacaacatcatcgagttcaacgccagcctggtcaacaacatccggaacagcggcctgcggagaagcttcgagacaaaggacttcggaaagacgtggaccgagtttcctccaatggacaagaaggtggacaaccggaaccacggcgtgcagggcagcacaatcacaatccctagcggcaacaaactggtggccgctcactctagcgcccagaacaagaacaacgattacaccagaagcgacatcagcctgtacgcccacaacctgtactccggcgaagtgaagctgatcgacgacttctaccccaaagtgggcaatgccagcggagccggctacagctgtctgagctaccggaaaaatgtggacaaagaaaccctgtacgtggtgtacgaggccaacggcagcatcgagtttcaggacctgagcagacatctgcccgtgatcaagagctacaatggcggaggtggaagtggcggaggcggatccgacaaaactcacacatgcccaccgtgcccagcacctgaactcctggggggaccgtcagtcttcctcttccccccaaaacccaaggacaccctcatgatctcccggacccctgaggtcacatgcgtggtggtggacgtgagccacgaagaccctgaggtcaagttcaactggtacgtggacggcgtggaggtgcataatgccaagacaaagccgcgggaggagcagtacaacagcacgtaccgtgtggtcagcgtcctcaccgtcctgcaccaggactggctgaatggcaaggagtacaagtgcaaggtctccaacaaagccctcccagcccccatcgagaaaaccatctccaaagccaaagggcagccccgagaaccacaggtctacaccctgcccccatcccgggaggagatgaccaagaaccaggtcagcctgacctgcctggtcaaaggcttctatcccagcgacatcgccgtggagtgggagagcaatgggcagccggagaacaactacaagaccacgcctcccgtgctggactccgacggctccttcttcctcactagcaagctcaccgtggacaagagcaggtggcagcaggggaacgtcttctcatgctccgtgatgcatgaggctctgcacaaccactacacgcagaagagcctctccctgtctccgggtaaa

SEQ ID NO: 98 - protein, 611 aa, Artificial Sequence
  Description of Artificial Sequence: Synthetic polypeptide
ASLPYLQKESVFQSGAHAYRIPALLYLPGQQSLLAFAEQRASKKDEHAELIVLRRGDYDAPTHQVQWQAQEVVAQARLDGHRSMNPCPLYDAQTGTLFLFFIAIPGQVTEQQQLQTRANVTRLCQVTSTDHGRTWSSPRDLTDAAIGPAYREWSTFAVGPGHCLQLHDRARSLVVPAYAYRKLHPKQRPIPSAFCFLSHDHGRTWARGHFVAQDTLECQVAEVETGEQRVVTLNARSHLRARVQAQSTNDGLDFQESQLVKKLVEPPPQGCQGSVISFPSPRSGPGSPAQWLLYTHPTHSWQRADLGAYLNPRPPAPEAWSEPVLLAKGSCAYSDLQSMGTGPDGSPLFGCLYEANDYEEIVFLMFTLKQAFPAEYLPQEPKSSDKTHTCPPCPAPELLGGPSVFLFPPKPKDTLMISRTPEVTCVVVDVSHEDPEVKFNWYVDGVEVHNAKTKPREEQYNSTYRVVSVLTVLHQDWLNGKEYKCKVSNKALPAPIEKTISKAKGQPREPQVYTLPPSREEMTKNQVSLTCLVKGFYPSDIAVEWESNGQPENNYKTTPPVLDSDGSFFLTSKLTVDKSRWQQGNVFSCSVMHEALHNHYTQKSLSLSPGK

SEQ ID NO: 99 - protein, 611 aa, Artificial Sequence
  Description of Artificial Sequence: Synthetic polypeptide
ASLPYLQKESVFQSGAHAYRIPALLYLPGQQSLLAFAEQRASKKDEHAELIVLRRGDYDAPTHQVQWQAQEVVAQARLDGHRSMNPCPLYDAQTGTLFLFFIAIPGQVTEQQQLQTRANVTRLCQVTSTDHGRTWSSPRDLTDAAIGPAYREWSTFAVGPGHCLQLHDRARSLVVPAYAYRKLHPKQRPIPSAFCFLSHDHGRTWARGHFVAQDTLECQVAEVETGEQRVVTLNARSHLRARVQAQSTNDGLDFQESQLVKKLVEPPPQGCQGSVISFPSPRSGPGSPAQWLLYTHPTHSWQRADLGAYLNPRPPAPEAWSEPVLLAKGSAAYSDLQSMGTGPDGSPLFGCLYEANDYEEIVFLMFTLKQAFPAEYLPQEPKSSDKTHTCPPCPAPELLGGPSVFLFPPKPKDTLMISRTPEVTCVVVDVSHEDPEVKFNWYVDGVEVHNAKTKPREEQYNSTYRVVSVLTVLHQDWLNGKEYKCKVSNKALPAPIEKTISKAKGQPREPQVYTLPPSREEMTKNQVSLTCLVKGFYPSDIAVEWESNGQPENNYKTTPPVLDSDGSFFLTSKLTVDKSRWQQGNVFSCSVMHEALHNHYTQKSLSLSPGK

SEQ ID NO: 100 - protein, 612 aa, Artificial Sequence
  Description of Artificial Sequence: Synthetic polypeptide
AASLPYLQKESVFQSGAHAYRIPALLYLPGQQSLLAFAEQRASKKDEHAELIVLRRGDYDAPTHQVQWQAQEVVAQARLDGHRSMNPCPLYDAQTGTLFLFFIAIPGQVTEQQQLQTRANVTRLCQVTSTDHGRTWSSPRDLTDAAIGPAYREWSTFAVGPGHCLQLHDRARSLVVPAYAYRKLHPKQRPIPSAFCFLSHDHGRTWARGHFVAQDTLECQVAEVETGEQRVVTLNARSHLRARVQAQSTNDGLDFQESQLVKKLVEPPPQGCQGSVISFPSPRSGPGSPAQWLLYTHPTHSWQRADLGAYLNPRPPAPEAWSEPVLLAKGSAAYSDLQSMGTGPDGSPLFGCLYEANDYEEIVFLMFTLKQAFPAEYLPQEPKSSDKTHTCPPCPAPELLGGPSVFLFPPKPKDTLMISRTPEVTCVVVDVSHEDPEVKFNWYVDGVEVHNAKTKPREEQYNSTYRVVSVLTVLHQDWLNGKEYKCKVSNKALPAPIEKTISKAKGQPREPQVYTLPPSREEMTKNQVSLTCLVKGFYPSDIAVEWESNGQPENNYKTTPPVLDSDGSFFLTSKLTVDKSRWQQGNVFSCSVMHEALHNHYTQKSLSLSPGK

SEQ ID NO: 101 - protein, 612 aa, Artificial Sequence
  Description of Artificial Sequence: Synthetic polypeptide
DASLPYLQKESVFQSGAHAYRIPALLYLPGQQSLLAFAEQRASKKDEHAELIVLRRGDYDAPTHQVQWQAQEVVAQARLDGHRSMNPCPLYDAQTGTLFLFFIAIPGQVTEQQQLQTRANVTRLCQVTSTDHGRTWSSPRDLTDAAIGPAYREWSTFAVGPGHCLQLHDRARSLVVPAYAYRKLHPKQRPIPSAFCFLSHDHGRTWARGHFVAQDTLECQVAEVETGEQRVVTLNARSHLRARVQAQSTNDGLDFQESQLVKKLVEPPPQGCQGSVISFPSPRSGPGSPAQWLLYTHPTHSWQRADLGAYLNPRPPAPEAWSEPVLLAKGSAAYSDLQSMGTGPDGSPLFGCLYEANDYEEIVFLMFTLKQAFPAEYLPQEPKSSDKTHTCPPCPAPELLGGPSVFLFPPKPKDTLMISRTPEVTCVVVDVSHEDPEVKFNWYVDGVEVHNAKTKPREEQYNSTYRVVSVLTVLHQDWLNGKEYKCKVSNKALPAPIEKTISKAKGQPREPQVYTLPPSREEMTKNQVSLTCLVKGFYPSDIAVEWESNGQPENNYKTTPPVLDSDGSFFLTSKLTVDKSRWQQGNVFSCSVMHEALHNHYTQKSLSLSPGK

SEQ ID NO: 102 - protein, 612 aa, Artificial Sequence
  Description of Artificial Sequence: Synthetic polypeptide
AASLPYLQKESVFQSGAHAYRIPALLYLPGQQSLLAFAEQRASKKDEHAELIVLRRGDYDAPTHQVQWQAQEVVAQARLDGHRSMNPCPLYDAQTGTLFLFFIAIPGQVTEQQQLQTRANVTRLCQVTSTDHGRTWSSPRDLTDAAIGPAYREWSTFAVGPGHCLQLHDRARSLVVPAYAYRKLHPKQRPIPSAFCFLSHDHGRTWARGHFVAQDTLECQVAEVETGEQRVVTLNARSHLRARVQAQSTNDGLDFQESQLVKKLVEPPPQGCQGSVISFPSPRSGPGSPAQWLLYTHPTHSWQRADLGAYLNPRPPAPEAWSEPVLLAKGSCAYSDLQSMGTGPDGSPLFGCLYEANDYEEIVFLMFTLKQAFPAEYLPQEPKSSDKTHTCPPCPAPELLGGPSVFLFPPKPKDTLMISRTPEVTCVVVDVSHEDPEVKFNWYVDGVEVHNAKTKPREEQYNSTYRVVSVLTVLHQDWLNGKEYKCKVSNKALPAPIEKTISKAKGQPREPQVYTLPPSREEMTKNQVSLTCLVKGFYPSDIAVEWESNGQPENNYKTTPPVLDSDGSFFLTSKLTVDKSRWQQGNVFSCSVMHEALHNHYTQKSLSLSPGK

SEQ ID NO: 103 - protein, 612 aa, Artificial Sequence
  Description of Artificial Sequence: Synthetic polypeptide
DASLPYLQKESVFQSGAHAYRIPALLYLPGQQSLLAFAEQRASKKDEHAELIVLRRGDYDAPTHQVQWQAQEVVAQARLDGHRSMNPCPLYDAQTGTLFLFFIAIPGQVTEQQQLQTRANVTRLCQVTSTDHGRTWSSPRDLTDAAIGPAYREWSTFAVGPGHCLQLHDRARSLVVPAYAYRKLHPKQRPIPSAFCFLSHDHGRTWARGHFVAQDTLECQVAEVETGEQRVVTLNARSHLRARVQAQSTNDGLDFQESQLVKKLVEPPPQGCQGSVISFPSPRSGPGSPAQWLLYTHPTHSWQRADLGAYLNPRPPAPEAWSEPVLLAKGSCAYSDLQSMGTGPDGSPLFGCLYEANDYEEIVFLMFTLKQAFPAEYLPQEPKSSDKTHTCPPCPAPELLGGPSVFLFPPKPKDTLMISRTPEVTCVVVDVSHEDPEVKFNWYVDGVEVHNAKTKPREEQYNSTYRVVSVLTVLHQDWLNGKEYKCKVSNKALPAPIEKTISKAKGQPREPQVYTLPPSREEMTKNQVSLTCLVKGFYPSDIAVEWESNGQPENNYKTTPPVLDSDGSFFLTSKLTVDKSRWQQGNVFSCSVMHEALHNHYTQKSLSLSPGK

SEQ ID NO: 104 - protein, 612 aa, Artificial Sequence
  Description of Artificial Sequence: Synthetic polypeptide
MASLPYLQKESVFQSGAHAYRIPALLYLPGQQSLLAFAEQRASKKDEHAELIVLRRGDYDAPTHQVQWQAQEVVAQARLDGHRSMNPCPLYDAQTGTLFLFFIAIPGQVTEQQQLQTRANVTRLCQVTSTDHGRTWSSPRDLTDAAIGPAYREWSTFAVGPGHCLQLHDRARSLVVPAYAYRKLHPKQRPIPSAFCFLSHDHGRTWARGHFVAQDTLECQVAEVETGEQRVVTLNARSHLRARVQAQSTNDGLDFQESQLVKKLVEPPPQGCQGSVISFPSPRSGPGSPAQWLLYTHPTHSWQRADLGAYLNPRPPAPEAWSEPVLLAKGSCAYSDLQSMGTGPDGSPLFGCLYEANDYEEIVFLMFTLKQAFPAEYLPQEPKSSDKTHTCPPCPAPELLGGPSVFLFPPKPKDTLMISRTPEVTCVVVDVSHEDPEVKFNWYVDGVEVHNAKTKPREEQYNSTYRVVSVLTVLHQDWLNGKEYKCKVSNKALPAPIEKTISKAKGQPREPQVYTLPPSREEMTKNQVSLTCLVKGFYPSDIAVEWESNGQPENNYKTTPPVLDSDGSFFLTSKLTVDKSRWQQGNVFSCSVMHEALHNHYTQKSLSLSPGK

SEQ ID NO: 105 - protein, 612 aa, Artificial Sequence
  Description of Artificial Sequence: Synthetic polypeptide
MASLPYLQKESVFQSGAHAYRIPALLYLPGQQSLLAFAEQRASKKDEHAELIVLRRGDYDAPTHQVQWQAQEVVAQARLDGHRSMNPCPLYDAQTGTLFLFFIAIPGQVTEQQQLQTRANVTRLCQVTSTDHGRTWSSPRDLTDAAIGPAYREWSTFAVGPGHCLQLHDRARSLVVPAYAYRKLHPKQRPIPSAFCFLSHDHGRTWARGHFVAQDTLECQVAEVETGEQRVVTLNARSHLRARVQAQSTNDGLDFQESQLVKKLVEPPPQGCQGSVISFPSPRSGPGSPAQWLLYTHPTHSWQRADLGAYLNPRPPAPEAWSEPVLLAKGSAAYSDLQSMGTGPDGSPLFGCLYEANDYEEIVFLMFTLKQAFPAEYLPQEPKSSDKTHTCPPCPAPELLGGPSVFLFPPKPKDTLMISRTPEVTCVVVDVSHEDPEVKFNWYVDGVEVHNAKTKPREEQYNSTYRVVSVLTVLHQDWLNGKEYKCKVSNKALPAPIEKTISKAKGQPREPQVYTLPPSREEMTKNQVSLTCLVKGFYPSDIAVEWESNGQPENNYKTTPPVLDSDGSFFLTSKLTVDKSRWQQGNVFSCSVMHEALHNHYTQKSLSLSPGK

SEQ ID NO: 106 - protein, 612 aa, Artificial Sequence
  Description of Artificial Sequence: Synthetic polypeptide
DASLPYLQKESVFQSGAHAYRIPALLYLPGQQSLLAFAEQRASKKDEHAELIVLRRGDYDAGTHQVQWQAQEVVAQARLDGHRSMNPCPLYDEQTGTLFLFFIAIPGQVTEQQQLQTRANVTRLCQVTSTDHGRTWSSPRDLTDAAIGPAYREWSTFAVGPGHCLQLHDRARSLVVPAYAYRKLHPKQRPIPSAFCFLSHDHGRTWARGHFVAQDTLECQVAEVETGEQRVVTLNARSHLRARVQAQSTNDGLDFQESQLVKKLVEPPPQGCQGSVISFPSPRSGPGSPAQWLLYTHPTHSWQRADLGAYLNPRPPAPEAWSEPVLLAKGSAAYSDLQSMGTGPDGSPLFGCLYEANDYEEIVFLMFTLKQAFPAEYLPQEPKSSDKTHTCPPCPAPELLGGPSVFLFPPKPKDTLMISRTPEVTCVVVDVSHEDPEVKFNWYVDGVEVHNAKTKPREEQYNSTYRVVSVLTVLHQDWLNGKEYKCKVSNKALPAPIEKTISKAKGQPREPQVYTLPPSREEMTKNQVSLTCLVKGFYPSDIAVEWESNGQPENNYKTTPPVLDSDGSFFLTSKLTVDKSRWQQGNVFSCSVMHEALHNHYTQKSLSLSPGK

SEQ ID NO: 107 - protein, 612 aa, Artificial Sequence
  Description of Artificial Sequence: Synthetic polypeptide
DASLPYLQDESVFQSGAHAYRIPALLYLPGQQSLLAFAEQRASKKDEHAELIVLRRGDYDAPTHQVQWQAQEVVAQARLDGHRSMNPCPLYDEQTGTLFLFFIAIPGQVTEQQQLQTRANVTRLCQVTSTDHGRTWSSPRDLTDAAIGPAYREWSTFAVGPGHCLQLHDRARSLVVPAYAYRKLHPKQRPIPSAFCFLSHDHGRTWARGHFVAQDTLECQVAEVETGEQRVVTLNARSHLRARVQAQSTNDGLDFQESQLVKKLVEPPPQGCQGSVISFPSPRSGPGSPAQWLLYTHPTHSWQRADLGAYLNPRPPAPEAWSEPVLLAKGSAAYSDLQSMGTGPDGSPLFGCLYEANDYEEIRFIMFTLKQAFPAEYLPQEPKSSDKTHTCPPCPAPELLGGPSVFLFPPKPKDTLMISRTPEVTCVVVDVSHEDPEVKFNWYVDGVEVHNAKTKPREEQYNSTYRVVSVLTVLHQDWLNGKEYKCKVSNKALPAPIEKTISKAKGQPREPQVYTLPPSREEMTKNQVSLTCLVKGFYPSDIAVEWESNGQPENNYKTTPPVLDSDGSFFLTSKLTVDKSRWQQGNVFSCSVMHEALHNHYTQKSLSLSPGK

SEQ ID NO: 108 - protein, 612 aa, Artificial Sequence
  Description of Artificial Sequence: Synthetic polypeptide
DASLPYLQKESVFQSGAHAYRIPALLYLPGQQSLLAFAEQRASKKDEHAELIVLRRGDYDANTHQVQWQAQEVVAQARLDGHRSMNPCPLYDAQTGTLFLFFIAIPGQVTEQQQLQTRANVTRLCQVTSTDHGRTWSSPRDLTDAAIGPAYREWSTFAVGPGHCLQLHDRARSLVVPAYAYRKLHPKQRPIPSAFCFLSHDHGRTWARGHFVAQDTLECQVAEVETGEQRVVTLNARSHLRARVQAQSTNDGLDFQESQLVKKLVEPPPQGCQGSVISFPSPRSGPGSPAQWLLYTHPTHSWQRADLGAYLNPRPPAPEAWSEPVLLAKGSAAYSDLQSMGTGPDGSPLFGCLYEANDYEEIVFLMFTLKQAFPAEYLPQEPKSSDKTHTCPPCPAPELLGGPSVFLFPPKPKDTLMISRTPEVTCVVVDVSHEDPEVKFNWYVDGVEVHNAKTKPREEQYNSTYRVVSVLTVLHQDWLNGKEYKCKVSNKALPAPIEKTISKAKGQPREPQVYTLPPSREEMTKNQVSLTCLVKGFYPSDIAVEWESNGQPENNYKTTPPVLDSDGSFFLTSKLTVDKSRWQQGNVFSCSVMHEALHNHYTQKSLSLSPGK

SEQ ID NO: 109 - protein, 612 aa, Artificial Sequence
  Description of Artificial Sequence: Synthetic polypeptide
DASLPYLQKESVFQSGAHAYRIPALLYLPGQQSLLAFAEQRASKKDEHAELIVLRRGDYDAPTHQVQWQAQEVVAQARLDGHRSMNPCPLYDAQTGTLFLFFIAIPGQVTEQQQLQTRANVTRLCQVTSTDHGRTWSSPRDLTDAAIGPAYREWSTFAVGPGHCLQLHDRARSLVVPAYAYRKLHPKQRPIPSAFCFLSHDHGRTWARGHFVAQDTLECQVAEVETGEQRVVTLNARSHLRARVQAQSTNDGLDFQESQLVKKLVEPPPAGCQGSVISFPSPRSGPGSPAQWLLYTHPTHRKQRADLGAYLNPRPPAPEAWSEPVLLAKGSAAYSDLQSMGTGPDGSPLFGCLYEANDYEEIVFLMFTLKQAFPAEYLPQEPKSSDKTHTCPPCPAPELLGGPSVFLFPPKPKDTLMISRTPEVTCVVVDVSHEDPEVKFNWYVDGVEVHNAKTKPREEQYNSTYRVVSVLTVLHQDWLNGKEYKCKVSNKALPAPIEKTISKAKGQPREPQVYTLPPSREEMTKNQVSLTCLVKGFYPSDIAVEWESNGQPENNYKTTPPVLDSDGSFFLTSKLTVDKSRWQQGNVFSCSVMHEALHNHYTQKSLSLSPGK

SEQ ID NO: 110 - protein, 612 aa, Artificial Sequence
  Description of Artificial Sequence: Synthetic polypeptide
DASLPYLQKESVFQSGAHAYRIPALLYLPGQQSLLAFAEQRASKKDEHAELIVLRRGDYDASTHQVQWQAQEVVAQARLDGHRSMNPCPLYDAQTGTLFLFFIAIPGQVTEQQQLQTRANVTRLCQVTSTDHGRTWSSPRDLTDAAIGPAYREWSTFAVGPGHCLQLHDRARSLVVPAYAYRKLHPKQRPIPSAFCFLSHDHGRTWARGHFVAQDTLECQVAEVETGEQRVVTLNARSHLRARVQAQSTNDGLDFQESQLVKKLVEPPPAGCQGSVISFPSPRSGPGSPAQWLLYTHPTHRKQRADLGAYLNPRPPAPEAWSEPVLLAKGSAAYSDLQSMGTGPDGSPLFGCLYEANDYEEIVFLMFTLKQAFPAEYLPQEPKSSDKTHTCPPCPAPELLGGPSVFLFPPKPKDTLMISRTPEVTCVVVDVSHEDPEVKFNWYVDGVEVHNAKTKPREEQYNSTYRVVSVLTVLHQDWLNGKEYKCKVSNKALPAPIEKTISKAKGQPREPQVYTLPPSREEMTKNQVSLTCLVKGFYPSDIAVEWESNGQPENNYKTTPPVLDSDGSFFLTSKLTVDKSRWQQGNVFSCSVMHEALHNHYTQKSLSLSPGK

SEQ ID NO: 111 - protein, 612 aa, Artificial Sequence
  Description of Artificial Sequence: Synthetic polypeptide
DASLPYLQKESVFQSGAHAYRIPALLYLPGQQSLLAFAEQRASKKDEHAELIVLRRGDYDATTHQVQWQAQEVVAQARLDGHRSMNPCPLYDAQTGTLFLFFIAIPGQVTEQQQLQTRANVTRLCQVTSTDHGRTWSSPRDLTDAAIGPAYREWSTFAVGPGHCLQLHDRARSLVVPAYAYRKLHPKQRPIPSAFCFLSHDHGRTWARGHFVAQDTLECQVAEVETGEQRVVTLNARSHLRARVQAQSTNDGLDFQESQLVKKLVEPPPAGCQGSVISFPSPRSGPGSPAQWLLYTHPTHRKQRADLGAYLNPRPPAPEAWSEPVLLAKGSAAYSDLQSMGTGPDGSPLFGCLYEANDYEEIVFLMFTLKQAFPAEYLPQEPKSSDKTHTCPPCPAPELLGGPSVFLFPPKPKDTLMISRTPEVTCVVVDVSHEDPEVKFNWYVDGVEVHNAKTKPREEQYNSTYRVVSVLTVLHQDWLNGKEYKCKVSNKALPAPIEKTISKAKGQPREPQVYTLPPSREEMTKNQVSLTCLVKGFYPSDIAVEWESNGQPENNYKTTPPVLDSDGSFFLTSKLTVDKSRWQQGNVFSCSVMHEALHNHYTQKSLSLSPGK

SEQ ID NO: 112 - protein, 612 aa, Artificial Sequence
  Description of Artificial Sequence: Synthetic polypeptide
DASLPYLQKESVFQSGAHAYRIPALLYLPGQQSLLAFAEQRASKKDEHAELIVLRRGDYDANTHQVQWQAQEVVAQARLDGHRSMNPCPLYDAQTGTLFLFFIAIPGQVTEQQQLQTRANVTRLCQVTSTDHGRTWSSPRDLTDAAIGPAYREWSTFAVGPGHCLQLHDRARSLVVPAYAYRKLHPKQRPIPSAFCFLSHDHGRTWARGHFVAQDTLECQVAEVETGEQRVVTLNARSHLRARVQAQSTNDGLDFQESQLVKKLVEPPPAGCQGSVISFPSPRSGPGSPAQWLLYTHPTHRKQRADLGAYLNPRPPAPEAWSEPVLLAKGSAAYSDLQSMGTGPDGSPLFGCLYEANDYEEIVFLMFTLKQAFPAEYLPQEPKSSDKTHTCPPCPAPELLGGPSVFLFPPKPKDTLMISRTPEVTCVVVDVSHEDPEVKFNWYVDGVEVHNAKTKPREEQYNSTYRVVSVLTVLHQDWLNGKEYKCKVSNKALPAPIEKTISKAKGQPREPQVYTLPPSREEMTKNQVSLTCLVKGFYPSDIAVEWESNGQPENNYKTTPPVLDSDGSFFLTSKLTVDKSRWQQGNVFSCSVMHEALHNHYTQKSLSLSPGK

SEQ ID NO: 113 - protein, 616 aa, Artificial Sequence
  Description of Artificial Sequence: Synthetic polypeptide
ASLPYLQKESVFQSGAHAYRIPALLYLPGQQSLLAFAEQRASKKDEHAELIVLRRGDYDAPTHQVQWQAQEVVAQARLDGHRSMNPCPLYDAQTGTLFLFFIAIPGQVTEQQQLQTRANVTRLCQVTSTDHGRTWSSPRDLTDAAIGPAYREWSTFAVGPGHCLQLHDRARSLVVPAYAYRKLHPKQRPIPSAFCFLSHDHGRTWARGHFVAQDTLECQVAEVETGEQRVVTLNARSHLRARVQAQSTNDGLDFQESQLVKKLVEPPPQGCQGSVISFPSPRSGPGSPAQWLLYTHPTHSWQRADLGAYLNPRPPAPEAWSEPVLLAKGSCAYSDLQSMGTGPDGSPLFGCLYEANDYEEIVFLMFTLKQAFPAEYLPQGGGGSGGGGSDKTHTCPPCPAPELLGGPSVFLFPPKPKDTLMISRTPEVTCVVVDVSHEDPEVKFNWYVDGVEVHNAKTKPREEQYNSTYRVVSVLTVLHQDWLNGKEYKCKVSNKALPAPIEKTISKAKGQPREPQVYTLPPSREEMTKNQVSLTCLVKGFYPSDIAVEWESNGQPENNYKTTPPVLDSDGSFFLYSKLTVDKSRWQQGNVFSCSVMHEALHNHYTQKSLSLSPGK

SEQ ID NO: 114 - protein, 616 aa, Artificial Sequence
  Description of Artificial Sequence: Synthetic polypeptide
ASLPYLQKESVFQSGAHAYRIPALLYLPGQQSLLAFAEQRASKKDEHAELIVLRRGDYDAPTHQVQWQAQEVVAQARLDGHRSMNPCPLYDAQTGTLFLFFIAIPGQVTEQQQLQTRANVTRLCQVTSTDHGRTWSSPRDLTDAAIGPAYREWSTFAVGPGHCLQLHDRARSLVVPAYAYRKLHPKQRPIPSAFCFLSHDHGRTWARGHFVAQDTLECQVAEVETGEQRVVTLNARSHLRARVQAQSTNDGLDFQESQLVKKLVEPPPQGCQGSVISFPSPRSGPGSPAQWLLYTHPTHSWQRADLGAYLNPRPPAPEAWSEPVLLAKGSAAYSDLQSMGTGPDGSPLFGCLYEANDYEEIVFLMFTLKQAFPAEYLPQGGGGSGGGGSDKTHTCPPCPAPELLGGPSVFLFPPKPKDTLMISRTPEVTCVVVDVSHEDPEVKFNWYVDGVEVHNAKTKPREEQYNSTYRVVSVLTVLHQDWLNGKEYKCKVSNKALPAPIEKTISKAKGQPREPQVYTLPPSREEMTKNQVSLTCLVKGFYPSDIAVEWESNGQPENNYKTTPPVLDSDGSFFLYSKLTVDKSRWQQGNVFSCSVMHEALHNHYTQKSLSLSPGK

SEQ ID NO: 115 - protein, 617 aa, Artificial Sequence
  Description of Artificial Sequence: Synthetic polypeptide
AASLPYLQKESVFQSGAHAYRIPALLYLPGQQSLLAFAEQRASKKDEHAELIVLRRGDYDAPTHQVQWQAQEVVAQARLDGHRSMNPCPLYDAQTGTLFLFFIAIPGQVTEQQQLQTRANVTRLCQVTSTDHGRTWSSPRDLTDAAIGPAYREWSTFAVGPGHCLQLHDRARSLVVPAYAYRKLHPKQRPIPSAFCFLSHDHGRTWARGHFVAQDTLECQVAEVETGEQRVVTLNARSHLRARVQAQSTNDGLDFQESQLVKKLVEPPPQGCQGSVISFPSPRSGPGSPAQWLLYTHPTHSWQRADLGAYLNPRPPAPEAWSEPVLLAKGSAAYSDLQSMGTGPDGSPLFGCLYEANDYEEIVFLMFTLKQAFPAEYLPQGGGGSGGGGSDKTHTCPPCPAPELLGGPSVFLFPPKPKDTLMISRTPEVTCVVVDVSHEDPEVKFNWYVDGVEVHNAKTKPREEQYNSTYRVVSVLTVLHQDWLNGKEYKCKVSNKALPAPIEKTISKAKGQPREPQVYTLPPSREEMTKNQVSLTCLVKGFYPSDIAVEWESNGQPENNYKTTPPVLDSDGSFFLYSKLTVDKSRWQQGNVFSCSVMHEALHNHYTQKSLSLSPGK

SEQ ID NO: 116 - protein, 617 aa, Artificial Sequence
  Description of Artificial Sequence: Synthetic polypeptide
DASLPYLQKESVFQSGAHAYRIPALLYLPGQQSLLAFAEQRASKKDEHAELIVLRRGDYDAPTHQVQWQAQEVVAQARLDGHRSMNPCPLYDAQTGTLFLFFIAIPGQVTEQQQLQTRANVTRLCQVTSTDHGRTWSSPRDLTDAAIGPAYREWSTFAVGPGHCLQLHDRARSLVVPAYAYRKLHPKQRPIPSAFCFLSHDHGRTWARGHFVAQDTLECQVAEVETGEQRVVTLNARSHLRARVQAQSTNDGLDFQESQLVKKLVEPPPQGCQGSVISFPSPRSGPGSPAQWLLYTHPTHSWQRADLGAYLNPRPPAPEAWSEPVLLAKGSAAYSDLQSMGTGPDGSPLFGCLYEANDYEEIVFLMFTLKQAFPAEYLPQGGGGSGGGGSDKTHTCPPCPAPELLGGPSVFLFPPKPKDTLMISRTPEVTCVVVDVSHEDPEVKFNWYVDGVEVHNAKTKPREEQYNSTYRVVSVLTVLHQDWLNGKEYKCKVSNKALPAPIEKTISKAKGQPREPQVYTLPPSREEMTKNQVSLTCLVKGFYPSDIAVEWESNGQPENNYKTTPPVLDSDGSFFLYSKLTVDKSRWQQGNVFSCSVMHEALHNHYTQKSLSLSPGK

SEQ ID NO: 117 - protein, 617 aa, Artificial Sequence
  Description of Artificial Sequence: Synthetic polypeptide
AASLPYLQKESVFQSGAHAYRIPALLYLPGQQSLLAFAEQRASKKDEHAELIVLRRGDYDAPTHQVQWQAQEVVAQARLDGHRSMNPCPLYDAQTGTLFLFFIAIPGQVTEQQQLQTRANVTRLCQVTSTDHGRTWSSPRDLTDAAIGPAYREWSTFAVGPGHCLQLHDRARSLVVPAYAYRKLHPKQRPIPSAFCFLSHDHGRTWARGHFVAQDTLECQVAEVETGEQRVVTLNARSHLRARVQAQSTNDGLDFQESQLVKKLVEPPPQGCQGSVISFPSPRSGPGSPAQWLLYTHPTHSWQRADLGAYLNPRPPAPEAWSEPVLLAKGSCAYSDLQSMGTGPDGSPLFGCLYEANDYEEIVFLMFTLKQAFPAEYLPQGGGGSGGGGSDKTHTCPPCPAPELLGGPSVFLFPPKPKDTLMISRTPEVTCVVVDVSHEDPEVKFNWYVDGVEVHNAKTKPREEQYNSTYRVVSVLTVLHQDWLNGKEYKCKVSNKALPAPIEKTISKAKGQPREPQVYTLPPSREEMTKNQVSLTCLVKGFYPSDIAVEWESNGQPENNYKTTPPVLDSDGSFFLYSKLTVDKSRWQQGNVFSCSVMHEALHNHYTQKSLSLSPGK

SEQ ID NO: 118 - protein, 617 aa, Artificial Sequence
  Description of Artificial Sequence: Synthetic polypeptide
DASLPYLQKESVFQSGAHAYRIPALLYLPGQQSLLAFAEQRASKKDEHAELIVLRRGDYDAPTHQVQWQAQEVVAQARLDGHRSMNPCPLYDAQTGTLFLFFIAIPGQVTEQQQLQTRANVTRLCQVTSTDHGRTWSSPRDLTDAAIGPAYREWSTFAVGPGHCLQLHDRARSLVVPAYAYRKLHPKQRPIPSAFCFLSHDHGRTWARGHFVAQDTLECQVAEVETGEQRVVTLNARSHLRARVQAQSTNDGLDFQESQLVKKLVEPPPQGCQGSVISFPSPRSGPGSPAQWLLYTHPTHSWQRADLGAYLNPRPPAPEAWSEPVLLAKGSCAYSDLQSMGTGPDGSPLFGCLYEANDYEEIVFLMFTLKQAFPAEYLPQGGGGSGGGGSDKTHTCPPCPAPELLGGPSVFLFPPKPKDTLMISRTPEVTCVVVDVSHEDPEVKFNWYVDGVEVHNAKTKPREEQYNSTYRVVSVLTVLHQDWLNGKEYKCKVSNKALPAPIEKTISKAKGQPREPQVYTLPPSREEMTKNQVSLTCLVKGFYPSDIAVEWESNGQPENNYKTTPPVLDSDGSFFLYSKLTVDKSRWQQGNVFSCSVMHEALHNHYTQKSLSLSPGK

SEQ ID NO: 119 - protein, 617 aa, Artificial Sequence
  Description of Artificial Sequence: Synthetic polypeptide
MASLPYLQKESVFQSGAHAYRIPALLYLPGQQSLLAFAEQRASKKDEHAELIVLRRGDYDAPTHQVQWQAQEVVAQARLDGHRSMNPCPLYDAQTGTLFLFFIAIPGQVTEQQQLQTRANVTRLCQVTSTDHGRTWSSPRDLTDAAIGPAYREWSTFAVGPGHCLQLHDRARSLVVPAYAYRKLHPKQRPIPSAFCFLSHDHGRTWARGHFVAQDTLECQVAEVETGEQRVVTLNARSHLRARVQAQSTNDGLDFQESQLVKKLVEPPPQGCQGSVISFPSPRSGPGSPAQWLLYTHPTHSWQRADLGAYLNPRPPAPEAWSEPVLLAKGSCAYSDLQSMGTGPDGSPLFGCLYEANDYEEIVFLMFTLKQAFPAEYLPQGGGGSGGGGSDKTHTCPPCPAPELLGGPSVFLFPPKPKDTLMISRTPEVTCVVVDVSHEDPEVKFNWYVDGVEVHNAKTKPREEQYNSTYRVVSVLTVLHQDWLNGKEYKCKVSNKALPAPIEKTISKAKGQPREPQVYTLPPSREEMTKNQVSLTCLVKGFYPSDIAVEWESNGQPENNYKTTPPVLDSDGSFFLYSKLTVDKSRWQQGNVFSCSVMHEALHNHYTQKSLSLSPGK

SEQ ID NO: 120 - protein, 617 aa, Artificial Sequence
  Description of Artificial Sequence: Synthetic polypeptide
MASLPYLQKESVFQSGAHAYRIPALLYLPGQQSLLAFAEQRASKKDEHAELIVLRRGDYDAPTHQVQWQAQEVVAQARLDGHRSMNPCPLYDAQTGTLFLFFIAIPGQVTEQQQLQTRANVTRLCQVTSTDHGRTWSSPRDLTDAAIGPAYREWSTFAVGPGHCLQLHDRARSLVVPAYAYRKLHPKQRPIPSAFCFLSHDHGRTWARGHFVAQDTLECQVAEVETGEQRVVTLNARSHLRARVQAQSTNDGLDFQESQLVKKLVEPPPQGCQGSVISFPSPRSGPGSPAQWLLYTHPTHSWQRADLGAYLNPRPPAPEAWSEPVLLAKGSAAYSDLQSMGTGPDGSPLFGCLYEANDYEEIVFLMFTLKQAFPAEYLPQGGGGSGGGGSDKTHTCPPCPAPELLGGPSVFLFPPKPKDTLMISRTPEVTCVVVDVSHEDPEVKFNWYVDGVEVHNAKTKPREEQYNSTYRVVSVLTVLHQDWLNGKEYKCKVSNKALPAPIEKTISKAKGQPREPQVYTLPPSREEMTKNQVSLTCLVKGFYPSDIAVEWESNGQPENNYKTTPPVLDSDGSFFLYSKLTVDKSRWQQGNVFSCSVMHEALHNHYTQKSLSLSPGK

SEQ ID NO: 121 - protein, 617 aa, Artificial Sequence
  Description of Artificial Sequence: Synthetic polypeptide
DASLPYLQKESVFQSGAHAYRIPALLYLPGQQSLLAFAEQRASKKDEHAELIVLRRGDYDAGTHQVQWQAQEVVAQARLDGHRSMNPCPLYDEQTGTLFLFFIAIPGQVTEQQQLQTRANVTRLCQVTSTDHGRTWSSPRDLTDAAIGPAYREWSTFAVGPGHCLQLHDRARSLVVPAYAYRKLHPKQRPIPSAFCFLSHDHGRTWARGHFVAQDTLECQVAEVETGEQRVVTLNARSHLRARVQAQSTNDGLDFQESQLVKKLVEPPPQGCQGSVISFPSPRSGPGSPAQWLLYTHPTHSWQRADLGAYLNPRPPAPEAWSEPVLLAKGSAAYSDLQSMGTGPDGSPLFGCLYEANDYEEIVFLMFTLKQAFPAEYLPQGGGGSGGGGSDKTHTCPPCPAPELLGGPSVFLFPPKPKDTLMISRTPEVTCVVVDVSHEDPEVKFNWYVDGVEVHNAKTKPREEQYNSTYRVVSVLTVLHQDWLNGKEYKCKVSNKALPAPIEKTISKAKGQPREPQVYTLPPSREEMTKNQVSLTCLVKGFYPSDIAVEWESNGQPENNYKTTPPVLDSDGSFFLYSKLTVDKSRWQQGNVFSCSVMHEALHNHYTQKSLSLSPGK

SEQ ID NO: 122 - protein, 617 aa, Artificial Sequence
  Description of Artificial Sequence: Synthetic polypeptide
DASLPYLQDESVFQSGAHAYRIPALLYLPGQQSLLAFAEQRASKKDEHAELIVLRRGDYDAPTHQVQWQAQEVVAQARLDGHRSMNPCPLYDEQTGTLFLFFIAIPGQVTEQQQLQTRANVTRLCQVTSTDHGRTWSSPRDLTDAAIGPAYREWSTFAVGPGHCLQLHDRARSLVVPAYAYRKLHPKQRPIPSAFCFLSHDHGRTWARGHFVAQDTLECQVAEVETGEQRVVTLNARSHLRARVQAQSTNDGLDFQESQLVKKLVEPPPQGCQGSVISFPSPRSGPGSPAQWLLYTHPTHSWQRADLGAYLNPRPPAPEAWSEPVLLAKGSAAYSDLQSMGTGPDGSPLFGCLYEANDYEEIRFIMFTLKQAFPAEYLPQGGGGSGGGGSDKTHTCPPCPAPELLGGPSVFLFPPKPKDTLMISRTPEVTCVVVDVSHEDPEVKFNWYVDGVEVHNAKTKPREEQYNSTYRVVSVLTVLHQDWLNGKEYKCKVSNKALPAPIEKTISKAKGQPREPQVYTLPPSREEMTKNQVSLTCLVKGFYPSDIAVEWESNGQPENNYKTTPPVLDSDGSFFLYSKLTVDKSRWQQGNVFSCSVMHEALHNHYTQKSLSLSPGK

SEQ ID NO: 123 - protein, 617 aa, Artificial Sequence
  Description of Artificial Sequence: Synthetic polypeptide
DASLPYLQKESVFQSGAHAYRIPALLYLPGQQSLLAFAEQRASKKDEHAELIVLRRGDYDANTHQVQWQAQEVVAQARLDGHRSMNPCPLYDAQTGTLFLFFIAIPGQVTEQQQLQTRANVTRLCQVTSTDHGRTWSSPRDLTDAAIGPAYREWSTFAVGPGHCLQLHDRARSLVVPAYAYRKLHPKQRPIPSAFCFLSHDHGRTWARGHFVAQDTLECQVAEVETGEQRVVTLNARSHLRARVQAQSTNDGLDFQESQLVKKLVEPPPQGCQGSVISFPSPRSGPGSPAQWLLYTHPTHSWQRADLGAYLNPRPPAPEAWSEPVLLAKGSAAYSDLQSMGTGPDGSPLFGCLYEANDYEEIVFLMFTLKQAFPAEYLPQGGGGSGGGGSDKTHTCPPCPAPELLGGPSVFLFPPKPKDTLMISRTPEVTCVVVDVSHEDPEVKFNWYVDGVEVHNAKTKPREEQYNSTYRVVSVLTVLHQDWLNGKEYKCKVSNKALPAPIEKTISKAKGQPREPQVYTLPPSREEMTKNQVSLTCLVKGFYPSDIAVEWESNGQPENNYKTTPPVLDSDGSFFLYSKLTVDKSRWQQGNVFSCSVMHEALHNHYTQKSLSLSPGK

SEQ ID NO: 124 - protein, 617 aa, Artificial Sequence
  Description of Artificial Sequence: Synthetic polypeptide
DASLPYLQKESVFQSGAHAYRIPALLYLPGQQSLLAFAEQRASKKDEHAELIVLRRGDYDAPTHQVQWQAQEVVAQARLDGHRSMNPCPLYDAQTGTLFLFFIAIPGQVTEQQQLQTRANVTRLCQVTSTDHGRTWSSPRDLTDAAIGPAYREWSTFAVGPGHCLQLHDRARSLVVPAYAYRKLHPKQRPIPSAFCFLSHDHGRTWARGHFVAQDTLECQVAEVETGEQRVVTLNARSHLRARVQAQSTNDGLDFQESQLVKKLVEPPPAGCQGSVISFPSPRSGPGSPAQWLLYTHPTHRKQRADLGAYLNPRPPAPEAWSEPVLLAKGSAAYSDLQSMGTGPDGSPLFGCLYEANDYEEIVFLMFTLKQAFPAEYLPQGGGGSGGGGSDKTHTCPPCPAPELLGGPSVFLFPPKPKDTLMISRTPEVTCVVVDVSHEDPEVKFNWYVDGVEVHNAKTKPREEQYNSTYRVVSVLTVLHQDWLNGKEYKCKVSNKALPAPIEKTISKAKGQPREPQVYTLPPSREEMTKNQVSLTCLVKGFYPSDIAVEWESNGQPENNYKTTPPVLDSDGSFFLYSKLTVDKSRWQQGNVFSCSVMHEALHNHYTQKSLSLSPGK

SEQ ID NO: 125 - protein, 617 aa, Artificial Sequence
  Description of Artificial Sequence: Synthetic polypeptide
DASLPYLQKESVFQSGAHAYRIPALLYLPGQQSLLAFAEQRASKKDEHAELIVLRRGDYDASTHQVQWQAQEVVAQARLDGHRSMNPCPLYDAQTGTLFLFFIAIPGQVTEQQQLQTRANVTRLCQVTSTDHGRTWSSPRDLTDAAIGPAYREWSTFAVGPGHCLQLHDRARSLVVPAYAYRKLHPKQRPIPSAFCFLSHDHGRTWARGHFVAQDTLECQVAEVETGEQRVVTLNARSHLRARVQAQSTNDGLDFQESQLVKKLVEPPPAGCQGSVISFPSPRSGPGSPAQWLLYTHPTHRKQRADLGAYLNPRPPAPEAWSEPVLLAKGSAAYSDLQSMGTGPDGSPLFGCLYEANDYEEIVFLMFTLKQAFPAEYLPQGGGGSGGGGSDKTHTCPPCPAPELLGGPSVFLFPPKPKDTLMISRTPEVTCVVVDVSHEDPEVKFNWYVDGVEVHNAKTKPREEQYNSTYRVVSVLTVLHQDWLNGKEYKCKVSNKALPAPIEKTISKAKGQPREPQVYTLPPSREEMTKNQVSLTCLVKGFYPSDIAVEWESNGQPENNYKTTPPVLDSDGSFFLYSKLTVDKSRWQQGNVFSCSVMHEALHNHYTQKSLSLSPGK

SEQ ID NO: 126 - protein, 617 aa, Artificial Sequence
  Description of Artificial Sequence: Synthetic polypeptide
DASLPYLQKESVFQSGAHAYRIPALLYLPGQQSLLAFAEQRASKKDEHAELIVLRRGDYDATTHQVQWQAQEVVAQARLDGHRSMNPCPLYDAQTGTLFLFFIAIPGQVTEQQQLQTRANVTRLCQVTSTDHGRTWSSPRDLTDAAIGPAYREWSTFAVGPGHCLQLHDRARSLVVPAYAYRKLHPKQRPIPSAFCFLSHDHGRTWARGHFVAQDTLECQVAEVETGEQRVVTLNARSHLRARVQAQSTNDGLDFQESQLVKKLVEPPPAGCQGSVISFPSPRSGPGSPAQWLLYTHPTHRKQRADLGAYLNPRPPAPEAWSEPVLLAKGSAAYSDLQSMGTGPDGSPLFGCLYEANDYEEIVFLMFTLKQAFPAEYLPQGGGGSGGGGSDKTHTCPPCPAPELLGGPSVFLFPPKPKDTLMISRTPEVTCVVVDVSHEDPEVKFNWYVDGVEVHNAKTKPREEQYNSTYRVVSVLTVLHQDWLNGKEYKCKVSNKALPAPIEKTISKAKGQPREPQVYTLPPSREEMTKNQVSLTCLVKGFYPSDIAVEWESNGQPENNYKTTPPVLDSDGSFFLYSKLTVDKSRWQQGNVFSCSVMHEALHNHYTQKSLSLSPGK

SEQ ID NO: 127 - protein, 617 aa, Artificial Sequence
  Description of Artificial Sequence: Synthetic polypeptide
DASLPYLQKESVFQSGAHAYRIPALLYLPGQQSLLAFAEQRASKKDEHAELIVLRRGDYDANTHQVQWQAQEVVAQARLDGHRSMNPCPLYDAQTGTLFLFFIAIPGQVTEQQQLQTRANVTRLCQVTSTDHGRTWSSPRDLTDAAIGPAYREWSTFAVGPGHCLQLHDRARSLVVPAYAYRKLHPKQRPIPSAFCFLSHDHGRTWARGHFVAQDTLECQVAEVETGEQRVVTLNARSHLRARVQAQSTNDGLDFQESQLVKKLVEPPPAGCQGSVISFPSPRSGPGSPAQWLLYTHPTHRKQRADLGAYLNPRPPAPEAWSEPVLLAKGSAAYSDLQSMGTGPDGSPLFGCLYEANDYEEIVFLMFTLKQAFPAEYLPQGGGGSGGGGSDKTHTCPPCPAPELLGGPSVFLFPPKPKDTLMISRTPEVTCVVVDVSHEDPEVKFNWYVDGVEVHNAKTKPREEQYNSTYRVVSVLTVLHQDWLNGKEYKCKVSNKALPAPIEKTISKAKGQPREPQVYTLPPSREEMTKNQVSLTCLVKGFYPSDIAVEWESNGQPENNYKTTPPVLDSDGSFFLYSKLTVDKSRWQQGNVFSCSVMHEALHNHYTQKSLSLSPGK

SEQ ID NO: 128 - protein, 611 aa, Artificial Sequence
  Description of Artificial Sequence: Synthetic polypeptide
ASLPYLQKESVFQSGAHAYRIPALLYLPGQQSLLAFAEQRASKKDEHAELIVLRRGDYDAPTHQVQWQAQEVVAQARLDGHRSMNPCPLYDAQTGTLFLFFIAIPGQVTEQQQLQTRANVTRLCQVTSTDHGRTWSSPRDLTDAAIGPAYREWSTFAVGPGHCLQLHDRARSLVVPAYAYRKLHPKQRPIPSAFCFLSHDHGRTWARGHFVAQDTLECQVAEVETGEQRVVTLNARSHLRARVQAQSTNDGLDFQESQLVKKLVEPPPQGCQGSVISFPSPRSGPGSPAQWLLYTHPTHSWQRADLGAYLNPRPPAPEAWSEPVLLAKGSCAYSDLQSMGTGPDGSPLFGCLYEANDYEEIVFLMFTLKQAFPAEYLPQEPKSSDKTHTCPPCPAPELLGGPSVFLFPPKPKDTLMISRTPEVTCVVVDVSHEDPEVKFNWYVDGVEVHNAKTKPREEQYNSTYRVVSVLTVLHQDWLNGKEYKCKVSNKALPAPIEKTISKAKGQPREPQVYTLPPSREEMTKNQVSLTCLVKGFYPSDIAVEWESNGQPENNYKTTPPVLDSDGSFFLYSKLTVDKSRWQQGNVFSCSVMHEALHNHYTQKSLSLSPGK

SEQ ID NO: 129 - protein, 611 aa, Artificial Sequence
  Description of Artificial Sequence: Synthetic polypeptide
ASLPYLQKESVFQSGAHAYRIPALLYLPGQQSLLAFAEQRASKKDEHAELIVLRRGDYDAPTHQVQWQAQEVVAQARLDGHRSMNPCPLYDAQTGTLFLFFIAIPGQVTEQQQLQTRANVTRLCQVTSTDHGRTWSSPRDLTDAAIGPAYREWSTFAVGPGHCLQLHDRARSLVVPAYAYRKLHPKQRPIPSAFCFLSHDHGRTWARGHFVAQDTLECQVAEVETGEQRVVTLNARSHLRARVQAQSTNDGLDFQESQLVKKLVEPPPQGCQGSVISFPSPRSGPGSPAQWLLYTHPTHSWQRADLGAYLNPRPPAPEAWSEPVLLAKGSAAYSDLQSMGTGPDGSPLFGCLYEANDYEEIVFLMFTLKQAFPAEYLPQEPKSSDKTHTCPPCPAPELLGGPSVFLFPPKPKDTLMISRTPEVTCVVVDVSHEDPEVKFNWYVDGVEVHNAKTKPREEQYNSTYRVVSVLTVLHQDWLNGKEYKCKVSNKALPAPIEKTISKAKGQPREPQVYTLPPSREEMTKNQVSLTCLVKGFYPSDIAVEWESNGQPENNYKTTPPVLDSDGSFFLYSKLTVDKSRWQQGNVFSCSVMHEALHNHYTQKSLSLSPGK

SEQ ID NO: 130 - protein, 612 aa, Artificial Sequence
  Description of Artificial Sequence: Synthetic polypeptide
AASLPYLQKESVFQSGAHAYRIPALLYLPGQQSLLAFAEQRASKKDEHAELIVLRRGDYDAPTHQVQWQAQEVVAQARLDGHRSMNPCPLYDAQTGTLFLFFIAIPGQVTEQQQLQTRANVTRLCQVTSTDHGRTWSSPRDLTDAAIGPAYREWSTFAVGPGHCLQLHDRARSLVVPAYAYRKLHPKQRPIPSAFCFLSHDHGRTWARGHFVAQDTLECQVAEVETGEQRVVTLNARSHLRARVQAQSTNDGLDFQESQLVKKLVEPPPQGCQGSVISFPSPRSGPGSPAQWLLYTHPTHSWQRADLGAYLNPRPPAPEAWSEPVLLAKGSAAYSDLQSMGTGPDGSPLFGCLYEANDYEEIVFLMFTLKQAFPAEYLPQEPKSSDKTHTCPPCPAPELLGGPSVFLFPPKPKDTLMISRTPEVTCVVVDVSHEDPEVKFNWYVDGVEVHNAKTKPREEQYNSTYRVVSVLTVLHQDWLNGKEYKCKVSNKALPAPIEKTISKAKGQPREPQVYTLPPSREEMTKNQVSLTCLVKGFYPSDIAVEWESNGQPENNYKTTPPVLDSDGSFFLYSKLTVDKSRWQQGNVFSCSVMHEALHNHYTQKSLSLSPGK

SEQ ID NO: 131 - protein, 612 aa, Artificial Sequence
  Description of Artificial Sequence: Synthetic polypeptide
DASLPYLQKESVFQSGAHAYRIPALLYLPGQQSLLAFAEQRASKKDEHAELIVLRRGDYDAPTHQVQWQAQEVVAQARLDGHRSMNPCPLYDAQTGTLFLFFIAIPGQVTEQQQLQTRANVTRLCQVTSTDHGRTWSSPRDLTDAAIGPAYREWSTFAVGPGHCLQLHDRARSLVVPAYAYRKLHPKQRPIPSAFCFLSHDHGRTWARGHFVAQDTLECQVAEVETGEQRVVTLNARSHLRARVQAQSTNDGLDFQESQLVKKLVEPPPQGCQGSVISFPSPRSGPGSPAQWLLYTHPTHSWQRADLGAYLNPRPPAPEAWSEPVLLAKGSAAYSDLQSMGTGPDGSPLFGCLYEANDYEEIVFLMFTLKQAFPAEYLPQEPKSSDKTHTCPPCPAPELLGGPSVFLFPPKPKDTLMISRTPEVTCVVVDVSHEDPEVKFNWYVDGVEVHNAKTKPREEQYNSTYRVVSVLTVLHQDWLNGKEYKCKVSNKALPAPIEKTISKAKGQPREPQVYTLPPSREEMTKNQVSLTCLVKGFYPSDIAVEWESNGQPENNYKTTPPVLDSDGSFFLYSKLTVDKSRWQQGNVFSCSVMHEALHNHYTQKSLSLSPGK

SEQ ID NO: 132 - protein, 612 aa, Artificial Sequence
  Description of Artificial Sequence: Synthetic polypeptide
AASLPYLQKESVFQSGAHAYRIPALLYLPGQQSLLAFAEQRASKKDEHAELIVLRRGDYDAPTHQVQWQAQEVVAQARLDGHRSMNPCPLYDAQTGTLFLFFIAIPGQVTEQQQLQTRANVTRLCQVTSTDHGRTWSSPRDLTDAAIGPAYREWSTFAVGPGHCLQLHDRARSLVVPAYAYRKLHPKQRPIPSAFCFLSHDHGRTWARGHFVAQDTLECQVAEVETGEQRVVTLNARSHLRARVQAQSTNDGLDFQESQLVKKLVEPPPQGCQGSVISFPSPRSGPGSPAQWLLYTHPTHSWQRADLGAYLNPRPPAPEAWSEPVLLAKGSCAYSDLQSMGTGPDGSPLFGCLYEANDYEEIVFLMFTLKQAFPAEYLPQEPKSSDKTHTCPPCPAPELLGGPSVFLFPPKPKDTLMISRTPEVTCVVVDVSHEDPEVKFNWYVDGVEVHNAKTKPREEQYNSTYRVVSVLTVLHQDWLNGKEYKCKVSNKALPAPIEKTISKAKGQPREPQVYTLPPSREEMTKNQVSLTCLVKGFYPSDIAVEWESNGQPENNYKTTPPVLDSDGSFFLYSKLTVDKSRWQQGNVFSCSVMHEALHNHYTQKSLSLSPGK

SEQ ID NO: 133 - protein, 612 aa, Artificial Sequence
  Description of Artificial Sequence: Synthetic polypeptide
DASLPYLQKESVFQSGAHAYRIPALLYLPGQQSLLAFAEQRASKKDEHAELIVLRRGDYDAPTHQVQWQAQEVVAQARLDGHRSMNPCPLYDAQTGTLFLFFIAIPGQVTEQQQLQTRANVTRLCQVTSTDHGRTWSSPRDLTDAAIGPAYREWSTFAVGPGHCLQLHDRARSLVVPAYAYRKLHPKQRPIPSAFCFLSHDHGRTWARGHFVAQDTLECQVAEVETGEQRVVTLNARSHLRARVQAQSTNDGLDFQESQLVKKLVEPPPQGCQGSVISFPSPRSGPGSPAQWLLYTHPTHSWQRADLGAYLNPRPPAPEAWSEPVLLAKGSCAYSDLQSMGTGPDGSPLFGCLYEANDYEEIVFLMFTLKQAFPAEYLPQEPKSSDKTHTCPPCPAPELLGGPSVFLFPPKPKDTLMISRTPEVTCVVVDVSHEDPEVKFNWYVDGVEVHNAKTKPREEQYNSTYRVVSVLTVLHQDWLNGKEYKCKVSNKALPAPIEKTISKAKGQPREPQVYTLPPSREEMTKNQVSLTCLVKGFYPSDIAVEWESNGQPENNYKTTPPVLDSDGSFFLYSKLTVDKSRWQQGNVFSCSVMHEALHNHYTQKSLSLSPGK

SEQ ID NO: 134 - protein, 612 aa, Artificial Sequence
  Description of Artificial Sequence: Synthetic polypeptide
MASLPYLQKESVFQSGAHAYRIPALLYLPGQQSLLAFAEQRASKKDEHAELIVLRRGDYDAPTHQVQWQAQEVVAQARLDGHRSMNPCPLYDAQTGTLFLFFIAIPGQVTEQQQLQTRANVTRLCQVTSTDHGRTWSSPRDLTDAAIGPAYREWSTFAVGPGHCLQLHDRARSLVVPAYAYRKLHPKQRPIPSAFCFLSHDHGRTWARGHFVAQDTLECQVAEVETGEQRVVTLNARSHLRARVQAQSTNDGLDFQESQLVKKLVEPPPQGCQGSVISFPSPRSGPGSPAQWLLYTHPTHSWQRADLGAYLNPRPPAPEAWSEPVLLAKGSCAYSDLQSMGTGPDGSPLFGCLYEANDYEEIVFLMFTLKQAFPAEYLPQEPKSSDKTHTCPPCPAPELLGGPSVFLFPPKPKDTLMISRTPEVTCVVVDVSHEDPEVKFNWYVDGVEVHNAKTKPREEQYNSTYRVVSVLTVLHQDWLNGKEYKCKVSNKALPAPIEKTISKAKGQPREPQVYTLPPSREEMTKNQVSLTCLVKGFYPSDIAVEWESNGQPENNYKTTPPVLDSDGSFFLYSKLTVDKSRWQQGNVFSCSVMHEALHNHYTQKSLSLSPGK

SEQ ID NO: 135 - protein, 612 aa, Artificial Sequence
  Description of Artificial Sequence: Synthetic polypeptide
MASLPYLQKESVFQSGAHAYRIPALLYLPGQQSLLAFAEQRASKKDEHAELIVLRRGDYDAPTHQVQWQAQEVVAQARLDGHRSMNPCPLYDAQTGTLFLFFIAIPGQVTEQQQLQTRANVTRLCQVTSTDHGRTWSSPRDLTDAAIGPAYREWSTFAVGPGHCLQLHDRARSLVVPAYAYRKLHPKQRPIPSAFCFLSHDHGRTWARGHFVAQDTLECQVAEVETGEQRVVTLNARSHLRARVQAQSTNDGLDFQESQLVKKLVEPPPQGCQGSVISFPSPRSGPGSPAQWLLYTHPTHSWQRADLGAYLNPRPPAPEAWSEPVLLAKGSAAYSDLQSMGTGPDGSPLFGCLYEANDYEEIVFLMFTLKQAFPAEYLPQEPKSSDKTHTCPPCPAPELLGGPSVFLFPPKPKDTLMISRTPEVTCVVVDVSHEDPEVKFNWYVDGVEVHNAKTKPREEQYNSTYRVVSVLTVLHQDWLNGKEYKCKVSNKALPAPIEKTISKAKGQPREPQVYTLPPSREEMTKNQVSLTCLVKGFYPSDIAVEWESNGQPENNYKTTPPVLDSDGSFFLYSKLTVDKSRWQQGNVFSCSVMHEALHNHYTQKSLSLSPGK

SEQ ID NO: 136 - protein, 612 aa, Artificial Sequence
  Description of Artificial Sequence: Synthetic polypeptide
DASLPYLQKESVFQSGAHAYRIPALLYLPGQQSLLAFAEQRASKKDEHAELIVLRRGDYDAGTHQVQWQAQEVVAQARLDGHRSMNPCPLYDEQTGTLFLFFIAIPGQVTEQQQLQTRANVTRLCQVTSTDHGRTWSSPRDLTDAAIGPAYREWSTFAVGPGHCLQLHDRARSLVVPAYAYRKLHPKQRPIPSAFCFLSHDHGRTWARGHFVAQDTLECQVAEVETGEQRVVTLNARSHLRARVQAQSTNDGLDFQESQLVKKLVEPPPQGCQGSVISFPSPRSGPGSPAQWLLYTHPTHSWQRADLGAYLNPRPPAPEAWSEPVLLAKGSAAYSDLQSMGTGPDGSPLFGCLYEANDYEEIVFLMFTLKQAFPAEYLPQEPKSSDKTHTCPPCPAPELLGGPSVFLFPPKPKDTLMISRTPEVTCVVVDVSHEDPEVKFNWYVDGVEVHNAKTKPREEQYNSTYRVVSVLTVLHQDWLNGKEYKCKVSNKALPAPIEKTISKAKGQPREPQVYTLPPSREEMTKNQVSLTCLVKGFYPSDIAVEWESNGQPENNYKTTPPVLDSDGSFFLYSKLTVDKSRWQQGNVFSCSVMHEALHNHYTQKSLSLSPGK

SEQ ID NO: 137 - protein, 612 aa, Artificial Sequence
  Description of Artificial Sequence: Synthetic polypeptide
DASLPYLQDESVFQSGAHAYRIPALLYLPGQQSLLAFAEQRASKKDEHAELIVLRRGDYDAPTHQVQWQAQEVVAQARLDGHRSMNPCPLYDEQTGTLFLFFIAIPGQVTEQQQLQTRANVTRLCQVTSTDHGRTWSSPRDLTDAAIGPAYREWSTFAVGPGHCLQLHDRARSLVVPAYAYRKLHPKQRPIPSAFCFLSHDHGRTWARGHFVAQDTLECQVAEVETGEQRVVTLNARSHLRARVQAQSTNDGLDFQESQLVKKLVEPPPQGCQGSVISFPSPRSGPGSPAQWLLYTHPTHSWQRADLGAYLNPRPPAPEAWSEPVLLAKGSAAYSDLQSMGTGPDGSPLFGCLYEANDYEEIRFIMFTLKQAFPAEYLPQEPKSSDKTHTCPPCPAPELLGGPSVFLFPPKPKDTLMISRTPEVTCVVVDVSHEDPEVKFNWYVDGVEVHNAKTKPREEQYNSTYRVVSVLTVLHQDWLNGKEYKCKVSNKALPAPIEKTISKAKGQPREPQVYTLPPSREEMTKNQVSLTCLVKGFYPSDIAVEWESNGQPENNYKTTPPVLDSDGSFFLYSKLTVDKSRWQQGNVFSCSVMHEALHNHYTQKSLSLSPGK

SEQ ID NO: 138 - protein, 612 aa, Artificial Sequence
  Description of Artificial Sequence: Synthetic polypeptide
DASLPYLQKESVFQSGAHAYRIPALLYLPGQQSLLAFAEQRASKKDEHAELIVLRRGDYDANTHQVQWQAQEVVAQARLDGHRSMNPCPLYDAQTGTLFLFFIAIPGQVTEQQQLQTRANVTRLCQVTSTDHGRTWSSPRDLTDAAIGPAYREWSTFAVGPGHCLQLHDRARSLVVPAYAYRKLHPKQRPIPSAFCFLSHDHGRTWARGHFVAQDTLECQVAEVETGEQRVVTLNARSHLRARVQAQSTNDGLDFQESQLVKKLVEPPPQGCQGSVISFPSPRSGPGSPAQWLLYTHPTHSWQRADLGAYLNPRPPAPEAWSEPVLLAKGSAAYSDLQSMGTGPDGSPLFGCLYEANDYEEIVFLMFTLKQAFPAEYLPQEPKSSDKTHTCPPCPAPELLGGPSVFLFPPKPKDTLMISRTPEVTCVVVDVSHEDPEVKFNWYVDGVEVHNAKTKPREEQYNSTYRVVSVLTVLHQDWLNGKEYKCKVSNKALPAPIEKTISKAKGQPREPQVYTLPPSREEMTKNQVSLTCLVKGFYPSDIAVEWESNGQPENNYKTTPPVLDSDGSFFLYSKLTVDKSRWQQGNVFSCSVMHEALHNHYTQKSLSLSPGK

SEQ ID NO: 139 - protein, 612 aa, Artificial Sequence
  Description of Artificial Sequence: Synthetic polypeptide
DASLPYLQKESVFQSGAHAYRIPALLYLPGQQSLLAFAEQRASKKDEHAELIVLRRGDYDAPTHQVQWQAQEVVAQARLDGHRSMNPCPLYDAQTGTLFLFFIAIPGQVTEQQQLQTRANVTRLCQVTSTDHGRTWSSPRDLTDAAIGPAYREWSTFAVGPGHCLQLHDRARSLVVPAYAYRKLHPKQRPIPSAFCFLSHDHGRTWARGHFVAQDTLECQVAEVETGEQRVVTLNARSHLRARVQAQSTNDGLDFQESQLVKKLVEPPPAGCQGSVISFPSPRSGPGSPAQWLLYTHPTHRKQRADLGAYLNPRPPAPEAWSEPVLLAKGSAAYSDLQSMGTGPDGSPLFGCLYEANDYEEIVFLMFTLKQAFPAEYLPQEPKSSDKTHTCPPCPAPELLGGPSVFLFPPKPKDTLMISRTPEVTCVVVDVSHEDPEVKFNWYVDGVEVHNAKTKPREEQYNSTYRVVSVLTVLHQDWLNGKEYKCKVSNKALPAPIEKTISKAKGQPREPQVYTLPPSREEMTKNQVSLTCLVKGFYPSDIAVEWESNGQPENNYKTTPPVLDSDGSFFLYSKLTVDKSRWQQGNVFSCSVMHEALHNHYTQKSLSLSPGK

SEQ ID NO: 140 - protein, 612 aa, Artificial Sequence
  Description of Artificial Sequence: Synthetic polypeptide
DASLPYLQKESVFQSGAHAYRIPALLYLPGQQSLLAFAEQRASKKDEHAELIVLRRGDYDASTHQVQWQAQEVVAQARLDGHRSMNPCPLYDAQTGTLFLFFIAIPGQVTEQQQLQTRANVTRLCQVTSTDHGRTWSSPRDLTDAAIGPAYREWSTFAVGPGHCLQLHDRARSLVVPAYAYRKLHPKQRPIPSAFCFLSHDHGRTWARGHFVAQDTLECQVAEVETGEQRVVTLNARSHLRARVQAQSTNDGLDFQESQLVKKLVEPPPAGCQGSVISFPSPRSGPGSPAQWLLYTHPTHRKQRADLGAYLNPRPPAPEAWSEPVLLAKGSAAYSDLQSMGTGPDGSPLFGCLYEANDYEEIVFLMFTLKQAFPAEYLPQEPKSSDKTHTCPPCPAPELLGGPSVFLFPPKPKDTLMISRTPEVTCVVVDVSHEDPEVKFNWYVDGVEVHNAKTKPREEQYNSTYRVVSVLTVLHQDWLNGKEYKCKVSNKALPAPIEKTISKAKGQPREPQVYTLPPSREEMTKNQVSLTCLVKGFYPSDIAVEWESNGQPENNYKTTPPVLDSDGSFFLYSKLTVDKSRWQQGNVFSCSVMHEALHNHYTQKSLSLSPGK

SEQ ID NO: 141 - protein, 612 aa, Artificial Sequence
  Description of Artificial Sequence: Synthetic polypeptide
DASLPYLQKESVFQSGAHAYRIPALLYLPGQQSLLAFAEQRASKKDEHAELIVLRRGDYDATTHQVQWQAQEVVAQARLDGHRSMNPCPLYDAQTGTLFLFFIAIPGQVTEQQQLQTRANVTRLCQVTSTDHGRTWSSPRDLTDAAIGPAYREWSTFAVGPGHCLQLHDRARSLVVPAYAYRKLHPKQRPIPSAFCFLSHDHGRTWARGHFVAQDTLECQVAEVETGEQRVVTLNARSHLRARVQAQSTNDGLDFQESQLVKKLVEPPPAGCQGSVISFPSPRSGPGSPAQWLLYTHPTHRKQRADLGAYLNPRPPAPEAWSEPVLLAKGSAAYSDLQSMGTGPDGSPLFGCLYEANDYEEIVFLMFTLKQAFPAEYLPQEPKSSDKTHTCPPCPAPELLGGPSVFLFPPKPKDTLMISRTPEVTCVVVDVSHEDPEVKFNWYVDGVEVHNAKTKPREEQYNSTYRVVSVLTVLHQDWLNGKEYKCKVSNKALPAPIEKTISKAKGQPREPQVYTLPPSREEMTKNQVSLTCLVKGFYPSDIAVEWESNGQPENNYKTTPPVLDSDGSFFLYSKLTVDKSRWQQGNVFSCSVMHEALHNHYTQKSLSLSPGK

SEQ ID NO: 142 - protein, 612 aa, Artificial Sequence
  Description of Artificial Sequence: Synthetic polypeptide
DASLPYLQKESVFQSGAHAYRIPALLYLPGQQSLLAFAEQRASKKDEHAELIVLRRGDYDANTHQVQWQAQEVVAQARLDGHRSMNPCPLYDAQTGTLFLFFIAIPGQVTEQQQLQTRANVTRLCQVTSTDHGRTWSSPRDLTDAAIGPAYREWSTFAVGPGHCLQLHDRARSLVVPAYAYRKLHPKQRPIPSAFCFLSHDHGRTWARGHFVAQDTLECQVAEVETGEQRVVTLNARSHLRARVQAQSTNDGLDFQESQLVKKLVEPPPAGCQGSVISFPSPRSGPGSPAQWLLYTHPTHRKQRADLGAYLNPRPPAPEAWSEPVLLAKGSAAYSDLQSMGTGPDGSPLFGCLYEANDYEEIVFLMFTLKQAFPAEYLPQEPKSSDKTHTCPPCPAPELLGGPSVFLFPPKPKDTLMISRTPEVTCVVVDVSHEDPEVKFNWYVDGVEVHNAKTKPREEQYNSTYRVVSVLTVLHQDWLNGKEYKCKVSNKALPAPIEKTISKAKGQPREPQVYTLPPSREEMTKNQVSLTCLVKGFYPSDIAVEWESNGQPENNYKTTPPVLDSDGSFFLYSKLTVDKSRWQQGNVFSCSVMHEALHNHYTQKSLSLSPGK

SEQ ID NO: 143 - protein, 617 aa, Artificial Sequence
  Description of Artificial Sequence: Synthetic polypeptide
  MOD_RES (1)..(1): Ala, Arg, Asn, Asp, Gln, Glu, Gly, His, Leu, Lys, Met, Phe, Thr, Val, or not present
  MOD_RES (6)..(6): Phe, Trp, Tyr or Val
  MOD_RES (9)..(9): Lys or Asp
  MOD_RES (62)..(62): Pro, Asn, Asp, His, Glu, Gly, Ser or Thr
  MOD_RES (93)..(93): Ala, Glu, or Lys
  MOD_RES (187)..(187): Arg, Ile, or Lys
  MOD_RES (270)..(270): Gln, Ala, His, Phe, or Pro
  MOD_RES (301)..(301): Ser or Arg
  MOD_RES (302)..(302): Trp or Lys
  MOD_RES (332)..(332): Ala, Cys, Ser, or Val
  MOD_RES (363)..(363): Val or Arg
  MOD_RES (365)..(365): Leu, Gln, His, Ile, Lys, or Ser
  MOD_RES (381)..(390): This region may encompass one of the following sequences: "GGGGSGGGGS" or "EPKSS"
XASLPXLQXESVFQSGAHAYRIPALLYLPGQQSLLAFAEQRASKKDEHAELIVLRRGDYDAXTHQVQWQAQEVVAQARLDGHRSMNPCPLYDXQTGTLFLFFIAIPGQVTEQQQLQTRANVTRLCQVTSTDHGRTWSSPRDLTDAAIGPAYREWSTFAVGPGHCLQLHDRARSLVVPAYAYRKLHPXQRPIPSAFCFLSHDHGRTWARGHFVAQDTLECQVAEVETGEQRVVTLNARSHLRARVQAQSTNDGLDFQESQLVKKLVEPPPXGCQGSVISFPSPRSGPGSPAQWLLYTHPTHXXQRADLGAYLNPRPPAPEAWSEPVLLAKGSXAYSDLQSMGTGPDGSPLFGCLYEANDYEEIXFXMFTLKQAFPAEYLPQXXXXXXXXXXDKTHTCPPCPAPELLGGPSVFLFPPKPKDTLMISRTPEVTCVVVDVSHEDPEVKFNWYVDGVEVHNAKTKPREEQYNSTYRVVSVLTVLHQDWLNGKEYKCKVSNKALPAPIEKTISKAKGQPREPQVYTLPPSREEMTKNQVSLTCLVKGFYPSDIAVEWESNGQPENNYKTTPPVLDSDGSFFLTSKLTVDKSRWQQGNVFSCSVMHEALHNHYTQKSLSLSPGK

SEQ ID NO: 144 - protein, 617 aa, Artificial Sequence
  Description of Artificial Sequence: Synthetic polypeptide
  MOD_RES (1)..(1): Ala, Arg, Asn, Asp, Gln, Glu, Gly, His, Leu, Lys, Met, Phe, Thr, Val, or not present
  MOD_RES (2)..(2): Ala or Lys
  MOD_RES (4)..(4): Asn or Leu
  MOD_RES (5)..(5): Pro or His
  MOD_RES (6)..(6): Phe, Trp, Tyr or Val
  MOD_RES (9)..(9): Lys or Asp
  MOD_RES (44)..(44): Lys, Arg, or Glu
  MOD_RES (45)..(45): Lys, Ala, Arg, or Glu
  MOD_RES (54)..(54): Leu or Met
  MOD_RES (62)..(62): Pro, Asn, Asp, His, Glu, Gly, Ser or Thr
  MOD_RES (69)..(69): Gln or His
  MOD_RES (78)..(78): Arg or Lys
  MOD_RES (93)..(93): Ala, Glu or Lys
  MOD_RES (107)..(107): Gly or Asp
  MOD_RES (108)..(108): Gln or His
  MOD_RES (112)..(112): Gln, Arg, or Lys
  MOD_RES (125)..(125): Ala, Cys, Ile, Ser, Val, or Leu
  MOD_RES (126)..(126): Gln or Leu
  MOD_RES (150)..(150): Ala or Val
  MOD_RES (164)..(164): Cys or Gly
  MOD_RES (171)..(171): Ala or Gly
  MOD_RES (187)..(187): Arg, Ile, or Lys
  MOD_RES (196)..(196): Ala, Cys, Leu, or Val
  MOD_RES (217)..(217): Leu, Ala, or Val
  MOD_RES (249)..(249): Thr or Ala
  MOD_RES (251)..(251): Asp or Gly
  MOD_RES (257)..(257): Glu or Lys
  MOD_RES (270)..(270): Gln, Ala, His, Phe, or Pro
  MOD_RES (272)..(272): Cys or Val
  MOD_RES (292)..(292): Trp or Arg
  MOD_RES (301)..(301): Ser or Arg
  MOD_RES (302)..(302): Trp or Lys
  MOD_RES (325)..(325): Lys or Val
  MOD_RES (332)..(332): Ala, Cys, Ser, or Val
  MOD_RES (352)..(352): Cys, Leu, or Val
  MOD_RES (363)..(363): Val or Arg
  MOD_RES (365)..(365): Leu, Gln, His, Ile, Lys, or Ser
  MOD_RES (381)..(390): This region may encompass one of the following sequences: "GGGGSGGGGS" or "EPKSS"
XXSXXXLQXESVFQSGAHAYRIPALLYLPGQQSLLAFAEQRASXXDEHAELIVXRRGDYDAXTHQVQWXAQEVVAQAXLDGHRSMNPCPLYDXQTGTLFLFFIAIPXXVTEXQQLQTRANVTRLXXVTSTDHGRTWSSPRDLTDAAIGPXYREWSTFAVGPGHXLQLHDRXRSLVVPAYAYRKLHPXQRPIPSAFXFLSHDHGRTWARGHFVAQDTXECQVAEVETGEQRVVTLNARSHLRARVQAQSXNXGLDFQXSQLVKKLVEPPPXGXQGSVISFPSPRSGPGSPAQXLLYTHPTHXXQRADLGAYLNPRPPAPEAWSEPXLLAKGSXAYSDLQSMGTGPDGSPLFGXLYEANDYEEIXFXMFTLKQAFPAEYLPQXXXXXXXXXXDKTHTCPPCPAPELLGGPSVFLFPPKPKDTLMISRTPEVTCVVVDVSHEDPEVKFNWYVDGVEVHNAKTKPREEQYNSTYRVVSVLTVLHQDWLNGKEYKCKVSNKALPAPIEKTISKAKGQPREPQVYTLPPSREEMTKNQVSLTCLVKGFYPSDIAVEWESNGQPENNYKTTPPVLDSDGSFFLTSKLTVDKSRWQQGNVFSCSVMHEALHNHYTQKSLSLSPGK

SEQ ID NO: 145 - protein, 10 aa, Artificial Sequence
  Description of Artificial Sequence: Synthetic peptide
GGGGSGGGGS

SEQ ID NO: 146 - protein, 5 aa, Artificial Sequence
  Description of Artificial Sequence: Synthetic peptide
EPKSS

SEQ ID NO: 147 - protein, 232 aa, Artificial Sequence
  Description of Artificial Sequence: Synthetic polypeptide
EPKSCDKTHTCPPCPAPELLGGPSVFLFPPKPKDTLMISRTPEVTCVVVDVSHEDPEVKFNWYVDGVEVHNAKTKPREEQYNSTYRVVSVLTVLHQDWLNGKEYKCKVSNKALPAPIEKTISKAKGQPREPQVYTLPPSREEMTKNQVSLTCLVKGFYPSDIAVEWESNGQPENNYKTTPPVLDSDGSFFLTSKLTVDKSRWQQGNVFSCSVMHEALHNHYTQKSLSLSPGK

SEQ ID NO: 148 - protein, 227 aa, Artificial Sequence
  Description of Artificial Sequence: Synthetic polypeptide
DKTHTCPPCPAPELLGGPSVFLFPPKPKDTLMISRTPEVTCVVVDVSHEDPEVKFNWYVDGVEVHNAKTKPREEQYNSTYRVVSVLTVLHQDWLNGKEYKCKVSNKALPAPIEKTISKAKGQPREPQVYTLPPSREEMTKNQVSLYCLVKGFYPSDIAVEWESNGQPENNYKTTPPVLDSDGSFFLYSKLTVDKSRWQQGNVFSCSVMHEALHNHYTQKSLSLSPGK

SEQ ID NO: 149 - protein, 380 aa, Artificial Sequence
  Description of Artificial Sequence: Synthetic polypeptide
DASLPYLQKESVFQSGAHAYRIPALLYLPGQQSLLAFAEQRASKKDEHAELIVLRRGDYDAGTHQVQWQAQEVVAQARLDGHRSMNPCPLYDEQTGTLFLFFIAIPGQVTEQQQLQTRANVTRLCQVTSTDHGRTWSSPRDLTDAAIGPAYREWSTFAVGPGHCLQLHDRARSLVVPAYAYRKLHPKQRPIPSAFCFLSHDHGRTWARGHFVAQDTLECQVAEVETGEQRVVTLNARSHLRARVQAQSTNDGLDFQESQLVKKLVEPPPQGCQGSVISFPSPRSGPGSPAQWLLYTHPTHARQRADLGAYLNPRPPAPEAWSEPVLLAKGSAAYSDLQSMGTGPDGSPLFGCLYEANDYEEIVFLMFTLKQAFPAEYLPQ

SEQ ID NO: 150 - protein, 617 aa, Artificial Sequence
  Description of Artificial Sequence: Synthetic polypeptide
DASLPYLQKESVFQSGAHAYRIPALLYLPGQQSLLAFAEQRASKKDEHAELIVLRRGDYDAGTHQVQWQAQEVVAQARLDGHRSMNPCPLYDEQTGTLFLFFIAIPGQVTEQQQLQTRANVTRLCQVTSTDHGRTWSSPRDLTDAAIGPAYREWSTFAVGPGHCLQLHDRARSLVVPAYAYRKLHPKQRPIPSAFCFLSHDHGRTWARGHFVAQDTLECQVAEVETGEQRVVTLNARSHLRARVQAQSTNDGLDFQESQLVKKLVEPPPQGCQGSVISFPSPRSGPGSPAQWLLYTHPTHARQRADLGAYLNPRPPAPEAWSEPVLLAKGSAAYSDLQSMGTGPDGSPLFGCLYEANDYEEIVFLMFTLKQAFPAEYLPQGGGGSGGGGSDKTHTCPPCPAPELLGGPSVFLFPPKPKDTLMISRTPEVTCVVVDVSHEDPEVKFNWYVDGVEVHNAKTKPREEQYNSTYRVVSVLTVLHQDWLNGKEYKCKVSNKALPAPIEKTISKAKGQPREPQVYTLPPSREEMTKNQVSLTCLVKGFYPSDIAVEWESNGQPENNYKTTPPVLDSDGSFFLTSKLTVDKSRWQQGNVFSCSVMHEALHNHYTQKSLSLSPGK

SEQ ID NO: 151 - protein, 612 aa, Artificial Sequence
  Description of Artificial Sequence: Synthetic polypeptide
DASLPYLQKESVFQSGAHAYRIPALLYLPGQQSLLAFAEQRASKKDEHAELIVLRRGDYDAGTHQVQWQAQEVVAQARLDGHRSMNPCPLYDEQTGTLFLFFIAIPGQVTEQQQLQTRANVTRLCQVTSTDHGRTWSSPRDLTDAAIGPAYREWSTFAVGPGHCLQLHDRARSLVVPAYAYRKLHPKQRPIPSAFCFLSHDHGRTWARGHFVAQDTLECQVAEVETGEQRVVTLNARSHLRARVQAQSTNDGLDFQESQLVKKLVEPPPQGCQGSVISFPSPRSGPGSPAQWLLYTHPTHARQRADLGAYLNPRPPAPEAWSEPVLLAKGSAAYSDLQSMGTGPDGSPLFGCLYEANDYEEIVFLMFTLKQAFPAEYLPQEPKSSDKTHTCPPCPAPELLGGPSVFLFPPKPKDTLMISRTPEVTCVVVDVSHEDPEVKFNWYVDGVEVHNAKTKPREEQYNSTYRVVSVLTVLHQDWLNGKEYKCKVSNKALPAPIEKTISKAKGQPREPQVYTLPPSREEMTKNQVSLTCLVKGFYPSDIAVEWESNGQPENNYKTTPPVLDSDGSFFLTSKLTVDKSRWQQGNVFSCSVMHEALHNHYTQKSLSLSPGK

SEQ ID NO: 152 - protein, 617 aa, Artificial Sequence
  Description of Artificial Sequence: Synthetic polypeptide
DASLPYLQKESVFQSGAHAYRIPALLYLPGQQSLLAFAEQRASKKDEHAELIVLRRGDYDAGTHQVQWQAQEVVAQARLDGHRSMNPCPLYDEQTGTLFLFFIAIPGQVTEQQQLQTRANVTRLCQVTSTDHGRTWSSPRDLTDAAIGPAYREWSTFAVGPGHCLQLHDRARSLVVPAYAYRKLHPKQRPIPSAFCFLSHDHGRTWARGHFVAQDTLECQVAEVETGEQRVVTLNARSHLRARVQAQSTNDGLDFQESQLVKKLVEPPPQGCQGSVISFPSPRSGPGSPAQWLLYTHPTHARQRADLGAYLNPRPPAPEAWSEPVLLAKGSAAYSDLQSMGTGPDGSPLFGCLYEANDYEEIVFLMFTLKQAFPAEYLPQGGGGSGGGGSDKTHTCPPCPAPELLGGPSVFLFPPKPKDTLMISRTPEVTCVVVDVSHEDPEVKFNWYVDGVEVHNAKTKPREEQYNSTYRVVSVLTVLHQDWLNGKEYKCKVSNKALPAPIEKTISKAKGQPREPQVYTLPPSREEMTKNQVSLTCLVKGFYPSDIAVEWESNGQPENNYKTTPPVLDSDGSFFLYSKLTVDKSRWQQGNVFSCSVMHEALHNHYTQKSLSLSPGK

SEQ ID NO: 153 - protein, 612 aa, Artificial Sequence
  Description of Artificial Sequence: Synthetic polypeptide
DASLPYLQKESVFQSGAHAYRIPALLYLPGQQSLLAFAEQRASKKDEHAELIVLRRGDYDAGTHQVQWQAQEVVAQARLDGHRSMNPCPLYDEQTGTLFLFFIAIPGQVTEQQQLQTRANVTRLCQVTSTDHGRTWSSPRDLTDAAIGPAYREWSTFAVGPGHCLQLHDRARSLVVPAYAYRKLHPKQRPIPSAFCFLSHDHGRTWARGHFVAQDTLECQVAEVETGEQRVVTLNARSHLRARVQAQSTNDGLDFQESQLVKKLVEPPPQGCQGSVISFPSPRSGPGSPAQWLLYTHPTHARQRADLGAYLNPRPPAPEAWSEPVLLAKGSAAYSDLQSMGTGPDGSPLFGCLYEANDYEEIVFLMFTLKQAFPAEYLPQEPKSSDKTHTCPPCPAPELLGGPSVFLFPPKPKDTLMISRTPEVTCVVVDVSHEDPEVKFNWYVDGVEVHNAKTKPREEQYNSTYRVVSVLTVLHQDWLNGKEYKCKVSNKALPAPIEKTISKAKGQPREPQVYTLPPSREEMTKNQVSLTCLVKGFYPSDIAVEWESNGQPENNYKTTPPVLDSDGSFFLYSKLTVDKSRWQQGNVFSCSVMHEALHNHYTQKSLSLSPGK

SEQ ID NO: 154 - protein, 380 aa, Artificial Sequence
  Description of Artificial Sequence: Synthetic polypeptide
DASLPYLQKESVFQSGAHAYRIPALLYLPGQQSLLAFAEQRASKKDEHAELIVLRRGDYDAGTHQVQWQAQEVVAQARLDGHRSMNPCPLYDEQTGTLFLFFIAIPGQVTEQQQLQTRANVTRLCYVTSTDHGRTWSSPRDLTDAAIGPAYREWSTFAVGPGHCLQLHDRARSLVVPAYAYRKLHPKQRPIPSAFCFLSHDHGRTWARGHFVAQDTLECQVAEVETGEQRVVTLNARSHLRARVQAQSTNDGLDFQESQLVKKLVEPPPTGCQGSVISFPSPRSGPGSPAQWLLYTHPTHSWQRADLGAYLNPRPPAPEAWSEPVLLAKGSAAYSDLQSMGTGPDGSPLFGCLYEANDYEEIVFLMFTLKQAFPAEYLPQ

SEQ ID NO: 155 - protein, 617 aa, Artificial Sequence
  Description of Artificial Sequence: Synthetic polypeptide
DASLPYLQKESVFQSGAHAYRIPALLYLPGQQSLLAFAEQRASKKDEHAELIVLRRGDYDAGTHQVQWQAQEVVAQARLDGHRSMNPCPLYDEQTGTLFLFFIAIPGQVTEQQQLQTRANVTRLCYVTSTDHGRTWSSPRDLTDAAIGPAYREWSTFAVGPGHCLQLHDRARSLVVPAYAYRKLHPKQRPIPSAFCFLSHDHGRTWARGHFVAQDTLECQVAEVETGEQRVVTLNARSHLRARVQAQSTNDGLDFQESQLVKKLVEPPPTGCQGSVISFPSPRSGPGSPAQWLLYTHPTHSWQRADLGAYLNPRPPAPEAWSEPVLLAKGSAAYSDLQSMGTGPDGSPLFGCLYEANDYEEIVFLMFTLKQAFPAEYLPQGGGGSGGGGSDKTHTCPPCPAPELLGGPSVFLFPPKPKDTLMISRTPEVTCVVVDVSHEDPEVKFNWYVDGVEVHNAKTKPREEQYNSTYRVVSVLTVLHQDWLNGKEYKCKVSNKALPAPIEKTISKAKGQPREPQVYTLPPSREEMTKNQVSLTCLVKGFYPSDIAVEWESNGQPENNYKTTPPVLDSDGSFFLTSKLTVDKSRWQQGNVFSCSVMHEALHNHYTQKSLSLSPGK

SEQ ID NO: 156 - protein, 612 aa, Artificial Sequence
  Description of Artificial Sequence: Synthetic polypeptide
DASLPYLQKESVFQSGAHAYRIPALLYLPGQQSLLAFAEQRASKKDEHAELIVLRRGDYDAGTHQVQWQAQEVVAQARLDGHRSMNPCPLYDEQTGTLFLFFIAIPGQVTEQQQLQTRANVTRLCYVTSTDHGRTWSSPRDLTDAAIGPAYREWSTFAVGPGHCLQLHDRARSLVVPAYAYRKLHPKQRPIPSAFCFLSHDHGRTWARGHFVAQDTLECQVAEVETGEQRVVTLNARSHLRARVQAQSTNDGLDFQESQLVKKLVEPPPTGCQGSVISFPSPRSGPGSPAQWLLYTHPTHSWQRADLGAYLNPRPPAPEAWSEPVLLAKGSAAYSDLQSMGTGPDGSPLFGCLYEANDYEEIVFLMFTLKQAFPAEYLPQEPKSSDKTHTCPPCPAPELLGGPSVFLFPPKPKDTLMISRTPEVTCVVVDVSHEDPEVKFNWYVDGVEVHNAKTKPREEQYNSTYRVVSVLTVLHQDWLNGKEYKCKVSNKALPAPIEKTISKAKGQPREPQVYTLPPSREEMTKNQVSLTCLVKGFYPSDIAVEWESNGQPENNYKTTPPVLDSDGSFFLTSKLTVDKSRWQQGNVFSCSVMHEALHNHYTQKSLSLSPGK

SEQ ID NO: 157 - protein, 617 aa, Artificial Sequence
  Description of Artificial Sequence: Synthetic polypeptide
DASLPYLQKESVFQSGAHAYRIPALLYLPGQQSLLAFAEQRASKKDEHAELIVLRRGDYDAGTHQVQWQAQEVVAQARLDGHRSMNPCPLYDEQTGTLFLFFIAIPGQVTEQQQLQTRANVTRLCYVTSTDHGRTWSSPRDLTDAAIGPAYREWSTFAVGPGHCLQLHDRARSLVVPAYAYRKLHPKQRPIPSAFCFLSHDHGRTWARGHFVAQDTLECQVAEVETGEQRVVTLNARSHLRARVQAQSTNDGLDFQESQLVKKLVEPPPTGCQGSVISFPSPRSGPGSPAQWLLYTHPTHSWQRADLGAYLNPRPPAPEAWSEPVLLAKGSAAYSDLQSMGTGPDGSPLFGCLYEANDYEEIVFLMFTLKQAFPAEYLPQGGGGSGGGGSDKTHTCPPCPAPELLGGPSVFLFPPKPKDTLMISRTPEVTCVVVDVSHEDPEVKFNWYVDGVEVHNAKTKPREEQYNSTYRVVSVLTVLHQDWLNGKEYKCKVSNKALPAPIEKTISKAKGQPREPQVYTLPPSREEMTKNQVSLTCLVKGFYPSDIAVEWESNGQPENNYKTTPPVLDSDGSFFLYSKLTVDKSRWQQGNVFSCSVMHEALHNHYTQKSLSLSPGK

SEQ ID NO: 158 - protein, 612 aa, Artificial Sequence
  Description of Artificial Sequence: Synthetic polypeptide
DASLPYLQKESVFQSGAHAYRIPALLYLPGQQSLLAFAEQRASKKDEHAELIVLRRGDYDAGTHQVQWQAQEVVAQARLDGHRSMNPCPLYDEQTGTLFLFFIAIPGQVTEQQQLQTRANVTRLCYVTSTDHGRTWSSPRDLTDAAIGPAYREWSTFAVGPGHCLQLHDRARSLVVPAYAYRKLHPKQRPIPSAFCFLSHDHGRTWARGHFVAQDTLECQVAEVETGEQRVVTLNARSHLRARVQAQSTNDGLDFQESQLVKKLVEPPPTGCQGSVISFPSPRSGPGSPAQWLLYTHPTHSWQRADLGAYLNPRPPAPEAWSEPVLLAKGSAAYSDLQSMGTGPDGSPLFGCLYEANDYEEIVFLMFTLKQAFPAEYLPQEPKSSDKTHTCPPCPAPELLGGPSVFLFPPKPKDTLMISRTPEVTCVVVDVSHEDPEVKFNWYVDGVEVHNAKTKPREEQYNSTYRVVSVLTVLHQDWLNGKEYKCKVSNKALPAPIEKTISKAKGQPREPQVYTLPPSREEMTKNQVSLTCLVKGFYPSDIAVEWESNGQPENNYKTTPPVLDSDGSFFLYSKLTVDKSRWQQGNVFSCSVMHEALHNHYTQKSLSLSPGK

SEQ ID NO: 159 - protein, 380 aa, Artificial Sequence
  Description of Artificial Sequence: Synthetic polypeptide
DASLPYLQKESVFQSGAHAYRIPALLYLPGQQSLLAFAEQRASKKDEHAELIVLRRGDYDAGTHQVQWQAQEVVAQARLDGHRSMNPCPLYDEQTGTLFLFFIAIPGQVTEQQQLQTRANVTRLCYVTSTDHGRTWSSPRDLTDAAIGPAYREWSTFAVGPGHCLQLHDRARSLVVPAYAYRKLHPKQRPIPSAFCFLSHDHGRTWARGHFVAQDTLECQVAEVETGEQRVVTLNARSHLRFRVQAQSTNDGLDFQESQLVKKLVEPPPTGCQGSVISFPSPRSGPGSPAQWLLYTHPTHSWQRADLGAYLNPRPPAPEAWSEPVLLAKGSAAYSDLQSMGTGPDGSPLFGCLYEANDYEEIVFLMFTLKQAFPAEYLPQ

SEQ ID NO: 160 - protein, 617 aa, Artificial Sequence
  Description of Artificial Sequence: Synthetic polypeptide
DASLPYLQKESVFQSGAHAYRIPALLYLPGQQSLLAFAEQRASKKDEHAELIVLRRGDYDAGTHQVQWQAQEVVAQARLDGHRSMNPCPLYDEQTGTLFLFFIAIPGQVTEQQQLQTRANVTRLCYVTSTDHGRTWSSPRDLTDAAIGPAYREWSTFAVGPGHCLQLHDRARSLVVPAYAYRKLHPKQRPIPSAFCFLSHDHGRTWARGHFVAQDTLECQVAEVETGEQRVVTLNARSHLRFRVQAQSTNDGLDFQESQLVKKLVEPPPTGCQGSVISFPSPRSGPGSPAQWLLYTHPTHSWQRADLGAYLNPRPPAPEAWSEPVLLAKGSAAYSDLQSMGTGPDGSPLFGCLYEANDYEEIVFLMFTLKQAFPAEYLPQGGGGSGGGGSDKTHTCPPCPAPELLGGPSVFLFPPKPKDTLMISRTPEVTCVVVDVSHEDPEVKFNWYVDGVEVHNAKTKPREEQYNSTYRVVSVLTVLHQDWLNGKEYKCKVSNKALPAPIEKTISKAKGQPREPQVYTLPPSREEMTKNQVSLTCLVKGFYPSDIAVEWESNGQPENNYKTTPPVLDSDGSFFLTSKLTVDKSRWQQGNVFSCSVMHEALHNHYTQKSLSLSPGK

SEQ ID NO: 161 - protein, 612 aa, Artificial Sequence
  Description of Artificial Sequence: Synthetic polypeptide
DASLPYLQKESVFQSGAHAYRIPALLYLPGQQSLLAFAEQRASKKDEHAELIVLRRGDYDAGTHQVQWQAQEVVAQARLDGHRSMNPCPLYDEQTGTLFLFFIAIPGQVTEQQQLQTRANVTRLCYVTSTDHGRTWSSPRDLTDAAIGPAYREWSTFAVGPGHCLQLHDRARSLVVPAYAYRKLHPKQRPIPSAFCFLSHDHGRTWARGHFVAQDTLECQVAEVETGEQRVVTLNARSHLRFRVQAQSTNDGLDFQESQLVKKLVEPPPTGCQGSVISFPSPRSGPGSPAQWLLYTHPTHSWQRADLGAYLNPRPPAPEAWSEPVLLAKGSAAYSDLQSMGTGPDGSPLFGCLYEANDYEEIVFLMFTLKQAFPAEYLPQEPKSSDKTHTCPPCPAPELLGGPSVFLFPPKPKDTLMISRTPEVTCVVVDVSHEDPEVKFNWYVDGVEVHNAKTKPREEQYNSTYRVVSVLTVLHQDWLNGKEYKCKVSNKALPAPIEKTISKAKGQPREPQVYTLPPSREEMTKNQVSLTCLVKGFYPSDIAVEWESNGQPENNYKTTPPVLDSDGSFFLTSKLTVDKSRWQQGNVFSCSVMHEALHNHYTQKSLSLSPGK

SEQ ID NO: 162 - protein, 617 aa, Artificial Sequence
  Description of Artificial Sequence: Synthetic polypeptide
DASLPYLQKESVFQSGAHAYRIPALLYLPGQQSLLAFAEQRASKKDEHAELIVLRRGDYDAGTHQVQWQAQEVVAQARLDGHRSMNPCPLYDEQTGTLFLFFIAIPGQVTEQQQLQTRANVTRLCYVTSTDHGRTWSSPRDLTDAAIGPAYREWSTFAVGPGHCLQLHDRARSLVVPAYAYRKLHPKQRPIPSAFCFLSHDHGRTWARGHFVAQDTLECQVAEVETGEQRVVTLNARSHLRFRVQAQSTNDGLDFQESQLVKKLVEPPPTGCQGSVISFPSPRSGPGSPAQWLLYTHPTHSWQRADLGAYLNPRPPAPEAWSEPVLLAKGSAAYSDLQSMGTGPDGSPLFGCLYEANDYEEIVFLMFTLKQAFPAEYLPQGGGGSGGGGSDKTHTCPPCPAPELLGGPSVFLFPPKPKDTLMISRTPEVTCVVVDVSHEDPEVKFNWYVDGVEVHNAKTKPREEQYNSTYRVVSVLTVLHQDWLNGKEYKCKVSNKALPAPIEKTISKAKGQPREPQVYTLPPSREEMTKNQVSLTCLVKGFYPSDIAVEWESNGQPENNYKTTPPVLDSDGSFFLYSKLTVDKSRWQQGNVFSCSVMHEALHNHYTQKSLSLSPGK

SEQ ID NO: 163 - protein, 612 aa, Artificial Sequence
  Description of Artificial Sequence: Synthetic polypeptide
DASLPYLQKESVFQSGAHAYRIPALLYLPGQQSLLAFAEQRASKKDEHAELIVLRRGDYDAGTHQVQWQAQEVVAQARLDGHRSMNPCPLYDEQTGTLFLFFIAIPGQVTEQQQLQTRANVTRLCYVTSTDHGRTWSSPRDLTDAAIGPAYREWSTFAVGPGHCLQLHDRARSLVVPAYAYRKLHPKQRPIPSAFCFLSHDHGRTWARGHFVAQDTLECQVAEVETGEQRVVTLNARSHLRFRVQAQSTNDGLDFQESQLVKKLVEPPPTGCQGSVISFPSPRSGPGSPAQWLLYTHPTHSWQRADLGAYLNPRPPAPEAWSEPVLLAKGSAAYSDLQSMGTGPDGSPLFGCLYEANDYEEIVFLMFTLKQAFPAEYLPQEPKSSDKTHTCPPCPAPELLGGPSVFLFPPKPKDTLMISRTPEVTCVVVDVSHEDPEVKFNWYVDGVEVHNAKTKPREEQYNSTYRVVSVLTVLHQDWLNGKEYKCKVSNKALPAPIEKTISKAKGQPREPQVYTLPPSREEMTKNQVSLTCLVKGFYPSDIAVEWESNGQPENNYKTTPPVLDSDGSFFLYSKLTVDKSRWQQGNVFSCSVMHEALHNHYTQKSLSLSPGK

SEQ ID NO: 164 - protein, 617 aa, Artificial Sequence
  Description of Artificial Sequence: Synthetic polypeptide
  MOD_RES (1)..(1): Ala, Arg, Asn, Asp, Gln, Glu, Gly, His, Leu, Lys, Met, Phe, Thr, Val, or not present
  MOD_RES (6)..(6): Phe, Trp, Tyr or Val
  MOD_RES (9)..(9): Lys or Asp
  MOD_RES (62)..(62): Pro, Asn, Asp, His, Glu, Gly, Ser or Thr
  MOD_RES (93)..(93): Ala, Glu, or Lys
  MOD_RES (126)..(126): Gln, Leu, Glu, Phe, His, Ile, Leu, or Tyr
  MOD_RES (187)..(187): Arg, Ile, or Lys
  MOD_RES (242)..(242): Ala, Cys, Phe, Gly, His, Ile, Lys, Leu, Met, Asn, Gln, Arg, Ser, Val, Trp, or Tyr
  MOD_RES (270)..(270): Gln, Ala, His, Phe, Pro, Ser, or Thr
  MOD_RES (301)..(301): Ser, Arg, Ala, Asp, Glu, Phe, Gly, His, Ile, Lys, Leu, Met, Asn, Pro, Gln, Thr, Val, Trp, or Tyr
  MOD_RES (302)..(302): Trp, Lys, Ala, Asp, Glu, Phe, Gly, His, Ile, Lys, Leu, Met, Asn, Pro, Gln, Arg, Ser, Thr, Val, or Tyr
  MOD_RES (332)..(332): Ala, Cys, Ser, or Val
  MOD_RES (363)..(363): Val or Arg
  MOD_RES (365)..(365): Leu, Gln, His, Ile, Lys, or Ser
  MOD_RES (381)..(390): This region may encompass one of the following sequences: "GGGGS" or "GGGGSGGGGS" or "EPKSS"
XASLPXLQXESVFQSGAHAYRIPALLYLPGQQSLLAFAEQRASKKDEHAELIVLRRGDYDAXTHQVQWQAQEVVAQARLDGHRSMNPCPLYDXQTGTLFLFFIAIPGQVTEQQQLQTRANVTRLCXVTSTDHGRTWSSPRDLTDAAIGPAYREWSTFAVGPGHCLQLHDRARSLVVPAYAYRKLHPXQRPIPSAFCFLSHDHGRTWARGHFVAQDTLECQVAEVETGEQRVVTLNARSHLRXRVQAQSTNDGLDFQESQLVKKLVEPPPXGCQGSVISFPSPRSGPGSPAQWLLYTHPTHXXQRADLGAYLNPRPPAPEAWSEPVLLAKGSXAYSDLQSMGTGPDGSPLFGCLYEANDYEEIXFXMFTLKQAFPAEYLPQXXXXXXXXXXDKTHTCPPCPAPELLGGPSVFLFPPKPKDTLMISRTPEVTCVVVDVSHEDPEVKFNWYVDGVEVHNAKTKPREEQYNSTYRVVSVLTVLHQDWLNGKEYKCKVSNKALPAPIEKTISKAKGQPREPQVYTLPPSREEMTKNQVSLTCLVKGFYPSDIAVEWESNGQPENNYKTTPPVLDSDGSFFLTSKLTVDKSRWQQGNVFSCSVMHEALHNHYTQKSLSLSPGK

SEQ ID NO: 165 - protein, 617 aa, Artificial Sequence
  Description of Artificial Sequence: Synthetic polypeptide
  MOD_RES (1)..(1): Ala, Arg, Asn, Asp, Gln, Glu, Gly, His, Leu, Lys, Met, Phe, Thr, Val, or not present
  MOD_RES (2)..(2): Ala or Lys
  MOD_RES (4)..(4): Asn or Leu
  MOD_RES (5)..(5): Pro or His
  MOD_RES (6)..(6): Phe, Trp, Tyr or Val
  MOD_RES (9)..(9): Lys or Asp
  MOD_RES (44)..(44): Lys, Arg, or Glu
  MOD_RES (45)..(45): Lys, Ala, Arg, or Glu
  MOD_RES (54)..(54): Leu or Met
  MOD_RES (62)..(62): Pro, Asn, Asp, His, Glu, Gly, Ser or Thr
  MOD_RES (69)..(69): Gln or His
  MOD_RES (78)..(78): Arg or Lys
  MOD_RES (80)..(80): Asp or Pro
  MOD_RES (93)..(93): Ala, Glu or Lys
  MOD_RES (107)..(107): Gly or Asp
  MOD_RES (108)..(108): Gln or His
  MOD_RES (112)..(112): Gln, Arg, or Lys
  MOD_RES (125)..(125): Ala, Cys, Ile, Ser, Val, or Leu
  MOD_RES (126)..(126): Gln, Leu, Glu, Phe, His, Ile, Leu, or Tyr
  MOD_RES (150)..(150): Ala or Val
  MOD_RES (164)..(164): Cys or Gly
  MOD_RES (170)..(170): Arg or Pro
  MOD_RES (171)..(171): Ala or Gly
  MOD_RES (187)..(187): Arg, Ile, or Lys
  MOD_RES (188)..(188): Gln or Pro
  MOD_RES (189)..(189): Arg or Pro
  MOD_RES (196)..(196): Ala, Cys, Leu, or Val
  MOD_RES (213)..(213): Ala, Cys, Asn, Ser, or Thr
  MOD_RES (217)..(217): Leu, Ala, or Val
  MOD_RES (225)..(225): Glu or Pro
  MOD_RES (239)..(239): His or Pro
  MOD_RES (240)..(240): Leu, Asp, Asn, or Tyr
  MOD_RES (241)..(241): Arg, Ala, Asp, Leu, Gln, or Tyr
  MOD_RES (242)..(242): Ala, Cys, Phe, Gly, His, Ile, Lys, Leu, Met, Asn, Gln, Arg, Ser, Val, Trp, or Tyr
  MOD_RES (244)..(244): Val, Ile, or Lys
  MOD_RES (249)..(249): Thr or Ala
  MOD_RES (251)..(251): Asp or Gly
  MOD_RES (257)..(257): Glu, Lys, or Pro
  MOD_RES (258)..(258): Ser or Cys
  MOD_RES (260)..(260): Leu, Asp, Phe, Gln, or Thr
  MOD_RES (265)..(265): Val or Phe
  MOD_RES (270)..(270): Gln, Ala, His, Phe, Pro, Ser, or Thr
  MOD_RES (272)..(272): Cys or Val
  MOD_RES (292)..(292): Trp or Arg
  MOD_RES (301)..(301): Ser, Arg, Ala, Asp, Glu, Phe, Gly, His, Ile, Lys, Leu, Met, Asn, Pro, Gln, Thr, Val, Trp, or Tyr
  MOD_RES (302)..(302): Trp, Lys, Ala, Asp, Glu, Phe, Gly, His, Ile, Lys, Leu, Met, Asn, Pro, Gln, Arg, Ser, Thr, Val, or Tyr
  MOD_RES (325)..(325): Lys or Val
  MOD_RES (332)..(332): Ala, Cys, Ser, or Val
  MOD_RES (352)..(352): Cys, Leu, or Val
  MOD_RES (363)..(363): Val or Arg
  MOD_RES (365)..(365): Leu, Gln, His, Ile, Lys, or Ser
  MOD_RES (381)..(390): This region may encompass one of the following sequences: "GGGGS" or "GGGGSGGGGS" or "EPKSS"
XXSXXXLQXESVFQSGAHAYRIPALLYLPGQQSLLAFAEQRASXXDEHAELIVXRRGDYDAXTHQVQWXAQEVVAQAXLXGHRSMNPCPLYDXQTGTLFLFFIAIPXXVTEXQQLQTRANVTRLXXVTSTDHGRTWSSPRDLTDAAIGPXYREWSTFAVGPGHXLQLHDXXRSLVVPAYAYRKLHPXXXPIPSAFXFLSHDHGRTWARGHFVXQDTXECQVAEVXTGEQRVVTLNARSXXXXRXQAQSXNXGLDFQXXQXVKKLXEPPPXGXQGSVISFPSPRSGPGSPAQXLLYTHPTHXXQRADLGAYLNPRPPAPEAWSEPXLLAKGSXAYSDLQSMGTGPDGSPLFGXLYEANDYEEIXFXMFTLKQAFPAEYLPQXXXXXXXXXXDKTHTCPPCPAPELLGGPSVFLFPPKPKDTLMISRTPEVTCVVVDVSHEDPEVKFNWYVDGVEVHNAKTKPREEQYNSTYRVVSVLTVLHQDWLNGKEYKCKVSNKALPAPIEKTISKAKGQPREPQVYTLPPSREEMTKNQVSLTCLVKGFYPSDIAVEWESNGQPENNYKTTPPVLDSDGSFFLTSKLTVDKSRWQQGNVFSCSVMHEALHNHYTQKSLSLSPGK

SEQ ID NO: 166 - protein, 874 aa, Artificial Sequence
  Description of Artificial Sequence: Synthetic polypeptide
DASLPYLQKESVFQSGAHAYRIPALLYLPGQQSLLAFAEQRASKKDEHAELIVLRRGDYDAGTHQVQWQAQEVVAQARLDGHRSMNPCPLYDEQTGTLFLFFIAIPGQVTEQQQLQTRANVTRLCQVTSTDHGRTWSSPRDLTDAAIGPAYREWSTFAVGPGHCLQLHDRARSLVVPAYAYRKLHPKQRPIPSAFCFLSHDHGRTWARGHFVAQDTLECQVAEVETGEQRVVTLNARSHLRARVQAQSTNDGLDFQESQLVKKLVEPPPQGCQGSVISFPSPRSGPGSPAQWLLYTHPTHARQRADLGAYLNPRPPAPEAWSEPVLLAKGSAAYSDLQSMGTGPDGSPLFGCLYEANDYEEIVFLMFTLKQAFPAEYLPQGGGGSGGGGSDKTHTCPPCPAPELLGGPSVFLFPPKPKDTLMISRTPEVTCVVVDVSHEDPEVKFNWYVDGVEVHNAKTKPREEQYNSTYRVVSVLTVLHQDWLNGKEYKCKVSNKALPAPIEKTISKAKGQPREPQVYTLPPSREEMTKNQVSLTCLVKGFYPSDIAVEWESNGQPENNYKTTPPVLDSDGSFFLYSKLTVDKSRWQQGNVFSCSVMHEALHNHYTQKSLSLSPGKGGGGSGGGGSGGGGSEVQLVESGGGLVQPGGSLRLSCAASGFNIKDTYIHWVRQAPGKGLEWVARIYPTNGYTRYADSVKGRFTISADTSKNTAYLQMNSLRAEDTAVYYCSRWGGDGFYAMDYWGQGTLVTVSSGGGGSGGGGSGGGGSDIQMTQSPSSLSASVGDRVTITCRASQDVNTAVAWYQQKPGKAPKLLIYSASFLYSGVPSRFSGSRSGTDFTLTISSLQPEDFATYYCQQHYTTPPTFGQGTKVEIK

SEQ ID NO: 167 - protein, 874 aa, Artificial Sequence
  Description of Artificial Sequence: Synthetic polypeptide
DASLPYLQKESVFQSGAHAYRIPALLYLPGQQSLLAFAEQRASKKDEHAELIVLRRGDYDAGTHQVQWQAQEVVAQARLDGHRSMNPCPLYDEQTGTLFLFFIAIPGQVTEQQQLQTRANVTRLCYVTSTDHGRTWSSPRDLTDAAIGPAYREWSTFAVGPGHCLQLHDRARSLVVPAYAYRKLHPKQRPIPSAFCFLSHDHGRTWARGHFVAQDTLECQVAEVETGEQRVVTLNARSHLRARVQAQSTNDGLDFQESQLVKKLVEPPPTGCQGSVISFPSPRSGPGSPAQWLLYTHPTHSWQRADLGAYLNPRPPAPEAWSEPVLLAKGSAAYSDLQSMGTGPDGSPLFGCLYEANDYEEIVFLMFTLKQAFPAEYLPQGGGGSGGGGSDKTHTCPPCPAPELLGGPSVFLFPPKPKDTLMISRTPEVTCVVVDVSHEDPEVKFNWYVDGVEVHNAKTKPREEQYNSTYRVVSVLTVLHQDWLNGKEYKCKVSNKALPAPIEKTISKAKGQPREPQVYTLPPSREEMTKNQVSLTCLVKGFYPSDIAVEWESNGQPENNYKTTPPVLDSDGSFFLYSKLTVDKSRWQQGNVFSCSVMHEALHNHYTQKSLSLSPGKGGGGSGGGGSGGGGSEVQLVESGGGLVQPGGSLRLSCAASGFNIKDTYIHWVRQAPGKGLEWVARIYPTNGYTRYADSVKGRFTISADTSKNTAYLQMNSLRAEDTAVYYCSRWGGDGFYAMDYWGQGTLVTVSSGGGGSGGGGSGGGGSDIQMTQSPSSLSASVGDRVTITCRASQDVNTAVAWYQQKPGKAPKLLIYSASFLYSGVPSRFSGSRSGTDFTLTISSLQPEDFATYYCQQHYTTPPTFGQGTKVEIK

SEQ ID NO: 168 - protein, 874 aa, Artificial Sequence
  Description of Artificial Sequence: Synthetic polypeptide
DASLPYLQKESVFQSGAHAYRIPALLYLPGQQSLLAFAEQRASKKDEHAELIVLRRGDYDAGTHQVQWQAQEVVAQARLDGHRSMNPCPLYDEQTGTLFLFFIAIPGQVTEQQQLQTRANVTRLCYVTSTDHGRTWSSPRDLTDAAIGPAYREWSTFAVGPGHCLQLHDRARSLVVPAYAYRKLHPKQRPIPSAFCFLSHDHGRTWARGHFVAQDTLECQVAEVETGEQRVVTLNARSHLRFRVQAQSTNDGLDFQESQLVKKLVEPPPTGCQGSVISFPSPRSGPGSPAQWLLYTHPTHSWQRADLGAYLNPRPPAPEAWSEPVLLAKGSAAYSDLQSMGTGPDGSPLFGCLYEANDYEEIVFLMFTLKQAFPAEYLPQGGGGSGGGGSDKTHTCPPCPAPELLGGPSVFLFPPKPKDTLMISRTPEVTCVVVDVSHEDPEVKFNWYVDGVEVHNAKTKPREEQYNSTYRVVSVLTVLHQDWLNGKEYKCKVSNKALPAPIEKTISKAKGQPREPQVYTLPPSREEMTKNQVSLTCLVKGFYPSDIAVEWESNGQPENNYKTTPPVLDSDGSFFLYSKLTVDKSRWQQGNVFSCSVMHEALHNHYTQKSLSLSPGKGGGGSGGGGSGGGGSEVQLVESGGGLVQPGGSLRLSCAASGFNIKDTYIHWVRQAPGKGLEWVARIYPTNGYTRYADSVKGRFTISADTSKNTAYLQMNSLRAEDTAVYYCSRWGGDGFYAMDYWGQGTLVTVSSGGGGSGGGGSGGGGSDIQMTQSPSSLSASVGDRVTITCRASQDVNTAVAWYQQKPGKAPKLLIYSASFLYSGVPSRFSGSRSGTDFTLTISSLQPEDFATYYCQQHYTTPPTFGQGTKVEIK

SEQ ID NO: 169 - protein, 869 aa, Artificial Sequence
  Description of Artificial Sequence: Synthetic polypeptide
DASLPYLQKESVFQSGAHAYRIPALLYLPGQQSLLAFAEQRASKKDEHAELIVLRRGDYDAGTHQVQWQAQEVVAQARLDGHRSMNPCPLYDEQTGTLFLFFIAIPGQVTEQQQLQTRANVTRLCQVTSTDHGRTWSSPRDLTDAAIGPAYREWSTFAVGPGHCLQLHDRARSLVVPAYAYRKLHPKQRPIPSAFCFLSHDHGRTWARGHFVAQDTLECQVAEVETGEQRVVTLNARSHLRARVQAQSTNDGLDFQESQLVKKLVEPPPQGCQGSVISFPSPRSGPGSPAQWLLYTHPTHSWQRADLGAYLNPRPPAPEAWSEPVLLAKGSAAYSDLQSMGTGPDGSPLFGCLYEANDYEEIVFLMFTLKQAFPAEYLPQEPKSSDKTHTCPPCPAPELLGGPSVFLFPPKPKDTLMISRTPEVTCVVVDVSHEDPEVKFNWYVDGVEVHNAKTKPREEQYNSTYRVVSVLTVLHQDWLNGKEYKCKVSNKALPAPIEKTISKAKGQPREPQVYTLPPSREEMTKNQVSLTCLVKGFYPSDIAVEWESNGQPENNYKTTPPVLDSDGSFFLYSKLTVDKSRWQQGNVFSCSVMHEALHNHYTQKSLSLSPGKGGGGSGGGGSGGGGSEVQLVESGGGLVQPGGSLRLSCAASGFNIKDTYIHWVRQAPGKGLEWVARIYPTNGYTRYADSVKGRFTISADTSKNTAYLQMNSLRAEDTAVYYCSRWGGDGFYAMDYWGQGTLVTVSSGGGGSGGGGSGGGGSDIQMTQSPSSLSASVGDRVTITCRASQDVNTAVAWYQQKPGKAPKLLIYSASFLYSGVPSRFSGSRSGTDFTLTISSLQPEDFATYYCQQHYTTPPTFGQGTKVEIK

SEQ ID NO: 170 - protein, 869 aa, Artificial Sequence
  Description of Artificial Sequence: Synthetic polypeptide
DASLPYLQDESVFQSGAHAYRIPALLYLPGQQSLLAFAEQRASKKDEHAELIVLRRGDYDAPTHQVQWQAQEVVAQARLDGHRSMNPCPLYDEQTGTLFLFFIAIPGQVTEQQQLQTRANVTRLCQVTSTDHGRTWSSPRDLTDAAIGPAYREWSTFAVGPGHCLQLHDRARSLVVPAYAYRKLHPKQRPIPSAFCFLSHDHGRTWARGHFVAQDTLECQVAEVETGEQRVVTLNARSHLRARVQAQSTNDGLDFQESQLVKKLVEPPPQGCQGSVISFPSPRSGPGSPAQWLLYTHPTHSWQRADLGAYLNPRPPAPEAWSEPVLLAKGSAAYSDLQSMGTGPDGSPLFGCLYEANDYEEIRFIMFTLKQAFPAEYLPQEPKSSDKTHTCPPCPAPELLGGPSVFLFPPKPKDTLMISRTPEVTCVVVDVSHEDPEVKFNWYVDGVEVHNAKTKPREEQYNSTYRVVSVLTVLHQDWLNGKEYKCKVSNKALPAPIEKTISKAKGQPREPQVYTLPPSREEMTKNQVSLTCLVKGFYPSDIAVEWESNGQPENNYKTTPPVLDSDGSFFLYSKLTVDKSRWQQGNVFSCSVMHEALHNHYTQKSLSLSPGKGGGGSGGGGSGGGGSEVQLVESGGGLVQPGGSLRLSCAASGFNIKDTYIHWVRQAPGKGLEWVARIYPTNGYTRYADSVKGRFTISADTSKNTAYLQMNSLRAEDTAVYYCSRWGGDGFYAMDYWGQGTLVTVSSGGGGSGGGGSGGGGSDIQMTQSPSSLSASVGDRVTITCRASQDVNTAVAWYQQKPGKAPKLLIYSASFLYSGVPSRFSGSRSGTDFTLTISSLQPEDFATYYCQQHYTTPPTFGQGTKVEIK

SEQ ID NO: 171 - protein, 869 aa, Artificial Sequence
  Description of Artificial Sequence: Synthetic polypeptide
DASLPYLQKESVFQSGAHAYRIPALLYLPGQQSLLAFAEQRASKKDEHAELIVLRRGDYDANTHQVQWQAQEVVAQARLDGHRSMNPCPLYDAQTGTLFLFFIAIPGQVTEQQQLQTRANVTRLCQVTSTDHGRTWSSPRDLTDAAIGPAYREWSTFAVGPGHCLQLHDRARSLVVPAYAYRKLHPKQRPIPSAFCFLSHDHGRTWARGHFVAQDTLECQVAEVETGEQRVVTLNARSHLRARVQAQSTNDGLDFQESQLVKKLVEPPPQGCQGSVISFPSPRSGPGSPAQWLLYTHPTHSWQRADLGAYLNPRPPAPEAWSEPVLLAKGSAAYSDLQSMGTGPDGSPLFGCLYEANDYEEIVFLMFTLKQAFPAEYLPQEPKSSDKTHTCPPCPAPELLGGPSVFLFPPKPKDTLMISRTPEVTCVVVDVSHEDPEVKFNWYVDGVEVHNAKTKPREEQYNSTYRVVSVLTVLHQDWLNGKEYKCKVSNKALPAPIEKTISKAKGQPREPQVYTLPPSREEMTKNQVSLTCLVKGFYPSDIAVEWESNGQPENNYKTTPPVLDSDGSFFLYSKLTVDKSRWQQGNVFSCSVMHEALHNHYTQKSLSLSPGKGGGGSGGGGSGGGGSEVQLVESGGGLVQPGGSLRLSCAASGFNIKDTYIHWVRQAPGKGLEWVARIYPTNGYTRYADSVKGRFTISADTSKNTAYLQMNSLRAEDTAVYYCSRWGGDGFYAMDYWGQGTLVTVSSGGGGSGGGGSGGGGSDIQMTQSPSSLSASVGDRVTITCRASQDVNTAVAWYQQKPGKAPKLLIYSASFLYSGVPSRFSGSRSGTDFTLTISSLQPEDFATYYCQQHYTTPPTFGQGTKVEIK

SEQ ID NO: 172 - protein, 869 aa, Artificial Sequence
  Description of Artificial Sequence: Synthetic polypeptide
DASLPYLQKESVFQSGAHAYRIPALLYLPGQQSLLAFAEQRASKKDEHAELIVLRRGDYDAPTHQVQWQAQEVVAQARLDGHRSMNPCPLYDAQTGTLFLFFIAIPGQVTEQQQLQTRANVTRLCQVTSTDHGRTWSSPRDLTDAAIGPAYREWSTFAVGPGHCLQLHDRARSLVVPAYAYRKLHPKQRPIPSAFCFLSHDHGRTWARGHFVAQDTLECQVAEVETGEQRVVTLNARSHLRARVQAQSTNDGLDFQESQLVKKLVEPPPAGCQGSVISFPSPRSGPGSPAQWLLYTHPTHRKQRADLGAYLNPRPPAPEAWSEPVLLAKGSAAYSDLQSMGTGPDGSPLFGCLYEANDYEEIVFLMFTLKQAFPAEYLPQEPKSSDKTHTCPPCPAPELLGGPSVFLFPPKPKDTLMISRTPEVTCVVVDVSHEDPEVKFNWYVDGVEVHNAKTKPREEQYNSTYRVVSVLTVLHQDWLNGKEYKCKVSNKALPAPIEKTISKAKGQPREPQVYTLPPSREEMTKNQVSLTCLVKGFYPSDIAVEWESNGQPENNYKTTPPVLDSDGSFFLYSKLTVDKSRWQQGNVFSCSVMHEALHNHYTQKSLSLSPGKGGGGSGGGGSGGGGSEVQLVESGGGLVQPGGSLRLSCAASGFNIKDTYIHWVRQAPGKGLEWVARIYPTNGYTRYADSVKGRFTISADTSKNTAYLQMNSLRAEDTAVYYCSRWGGDGFYAMDYWGQGTLVTVSSGGGGSGGGGSGGGGSDIQMTQSPSSLSASVGDRVTITCRASQDVNTAVAWYQQKPGKAPKLLIYSASFLYSGVPSRFSGSRSGTDFTLTISSLQPEDFATYYCQQHYTTPPTFGQGTKVEIK

SEQ ID NO: 173 - protein, 869 aa, Artificial Sequence
  Description of Artificial Sequence: Synthetic polypeptide
DASLPYLQKESVFQSGAHAYRIPALLYLPGQQSLLAFAEQRASKKDEHAELIVLRRGDYDASTHQVQWQAQEVVAQARLDGHRSMNPCPLYDAQTGTLFLFFIAIPGQVTEQQQLQTRANVTRLCQVTSTDHGRTWSSPRDLTDAAIGPAYREWSTFAVGPGHCLQLHDRARSLVVPAYAYRKLHPKQRPIPSAFCFLSHDHGRTWARGHFVAQDTLECQVAEVETGEQRVVTLNARSHLRARVQAQSTNDGLDFQESQLVKKLVEPPPAGCQGSVISFPSPRSGPGSPAQWLLYTHPTHRKQRADLGAYLNPRPPAPEAWSEPVLLAKGSAAYSDLQSMGTGPDGSPLFGCLYEANDYEEIVFLMFTLKQAFPAEYLPQEPKSSDKTHTCPPCPAPELLGGPSVFLFPPKPKDTLMISRTPEVTCVVVDVSHEDPEVKFNWYVDGVEVHNAKTKPREEQYNSTYRVVSVLTVLHQDWLNGKEYKCKVSNKALPAPIEKTISKAKGQPREPQVYTLPPSREEMTKNQVSLTCLVKGFYPSDIAVEWESNGQPENNYKTTPPVLDSDGSFFLYSKLTVDKSRWQQGNVFSCSVMHEALHNHYTQKSLSLSPGKGGGGSGGGGSGGGGSEVQLVESGGGLVQPGGSLRLSCAASGFNIKDTYIHWVRQAPGKGLEWVARIYPTNGYTRYADSVKGRFTISADTSKNTAYLQMNSLRAEDTAVYYCSRWGGDGFYAMDYWGQGTLVTVSSGGGGSGGGGSGGGGSDIQMTQSPSSLSASVGDRVTITCRASQDVNTAVAWYQQKPGKAPKLLIYSASFLYSGVPSRFSGSRSGTDFTLTISSLQPEDFATYYCQQHYTTPPTFGQGTKVEIK

SEQ ID NO: 174 - protein, 869 aa, Artificial Sequence
  Description of Artificial Sequence: Synthetic polypeptide
DASLPYLQKESVFQSGAHAYRIPALLYLPGQQSLLAFAEQRASKKDEHAELIVLRRGDYDATTHQVQWQAQEVVAQARLDGHRSMNPCPLYDAQTGTLFLFFIAIPGQVTEQQQLQTRANVTRLCQVTSTDHGRTWSSPRDLTDAAIGPAYREWSTFAVGPGHCLQLHDRARSLVVPAYAYRKLHPKQRPIPSAFCFLSHDHGRTWARGHFVAQDTLECQVAEVETGEQRVVTLNARSHLRARVQAQSTNDGLDFQESQLVKKLVEPPPAGCQGSVISFPSPRSGPGSPAQWLLYTHPTHRKQRADLGAYLNPRPPAPEAWSEPVLLAKGSAAYSDLQSMGTGPDGSPLFGCLYEANDYEEIVFLMFTLKQAFPAEYLPQEPKSSDKTHTCPPCPAPELLGGPSVFLFPPKPKDTLMISRTPEVTCVVVDVSHEDPEVKFNWYVDGVEVHNAKTKPREEQYNSTYRVVSVLTVLHQDWLNGKEYKCKVSNKALPAPIEKTISKAKGQPREPQVYTLPPSREEMTKNQVSLTCLVKGFYPSDIAVEWESNGQPENNYKTTPPVLDSDGSFFLYSKLTVDKSRWQQGNVFSCSVMHEALHNHYTQKSLSLSPGKGGGGSGGGGSGGGGSEVQLVESGGGLVQPGGSLRLSCAASGFNIKDTYIHWVRQAPGKGLEWVARIYPTNGYTRYADSVKGRFTISADTSKNTAYLQMNSLRAEDTAVYYCSRWGGDGFYAMDYWGQGTLVTVSSGGGGSGGGGSGGGGSDIQMTQSPSSLSASVGDRVTITCRASQDVNTAVAWYQQKPGKAPKLLIYSASFLYSGVPSRFSGSRSGTDFTLTISSLQPEDFATYYCQQHYTTPPTFGQGTKVEIK

SEQ ID NO: 175 - protein, 869 aa, Artificial Sequence
  Description of Artificial Sequence: Synthetic polypeptide
DASLPYLQKESVFQSGAHAYRIPALLYLPGQQSLLAFAEQRASKKDEHAELIVLRRGDYDANTHQVQWQAQEVVAQARLDGHRSMNPCPLYDAQTGTLFLFFIAIPGQVTEQQQLQTRANVTRLCQVTSTDHGRTWSSPRDLTDAAIGPAYREWSTFAVGPGHCLQLHDRARSLVVPAYAYRKLHPKQRPIPSAFCFLSHDHGRTWARGHFVAQDTLECQVAEVETGEQRVVTLNARSHLRARVQAQSTNDGLDFQESQLVKKLVEPPPAGCQGSVISFPSPRSGPGSPAQWLLYTHPTHRKQRADLGAYLNPRPPAPEAWSEPVLLAKGSAAYSDLQSMGTGPDGSPLFGCLYEANDYEEIVFLMFTLKQAFPAEYLPQEPKSSDKTHTCPPCPAPELLGGPSVFLFPPKPKDTLMISRTPEVTCVVVDVSHEDPEVKFNWYVDGVEVHNAKTKPREEQYNSTYRVVSVLTVLHQDWLNGKEYKCKVSNKALPAPIEKTISKAKGQPREPQVYTLPPSREEMTKNQVSLTCLVKGFYPSDIAVEWESNGQPENNYKTTPPVLDSDGSFFLYSKLTVDKSRWQQGNVFSCSVMHEALHNHYTQKSLSLSPGKGGGGSGGGGSGGGGSEVQLVESGGGLVQPGGSLRLSCAASGFNIKDTYIHWVRQAPGKGLEWVARIYPTNGYTRYADSVKGRFTISADTSKNTAYLQMNSLRAEDTAVYYCSRWGGDGFYAMDYWGQGTLVTVSSGGGGSGGGGSGGGGSDIQMTQSPSSLSASVGDRVTITCRASQDVNTAVAWYQQKPGKAPKLLIYSASFLYSGVPSRFSGSRSGTDFTLTISSLQPEDFATYYCQQHYTTPPTFGQGTKVEIK

SEQ ID NO: 176 - protein, 869 aa, Artificial Sequence
  Description of Artificial Sequence: Synthetic polypeptide
DASLPYLQKESVFQSGAHAYRIPALLYLPGQQSLLAFAEQRASKKDEHAELIVLRRGDYDAGTHQVQWQAQEVVAQARLDGHRSMNPCPLYDEQTGTLFLFFIAIPGQVTEQQQLQTRANVTRLCQVTSTDHGRTWSSPRDLTDAAIGPAYREWSTFAVGPGHCLQLHDRARSLVVPAYAYRKLHPKQRPIPSAFCFLSHDHGRTWARGHFVAQDTLECQVAEVETGEQRVVTLNARSHLRARVQAQSTNDGLDFQESQLVKKLVEPPPQGCQGSVISFPSPRSGPGSPAQWLLYTHPTHARQRADLGAYLNPRPPAPEAWSEPVLLAKGSAAYSDLQSMGTGPDGSPLFGCLYEANDYEEIVFLMFTLKQAFPAEYLPQEPKSSDKTHTCPPCPAPELLGGPSVFLFPPKPKDTLMISRTPEVTCVVVDVSHEDPEVKFNWYVDGVEVHNAKTKPREEQYNSTYRVVSVLTVLHQDWLNGKEYKCKVSNKALPAPIEKTISKAKGQPREPQVYTLPPSREEMTKNQVSLTCLVKGFYPSDIAVEWESNGQPENNYKTTPPVLDSDGSFFLYSKLTVDKSRWQQGNVFSCSVMHEALHNHYTQKSLSLSPGKGGGGSGGGGSGGGGSEVQLVESGGGLVQPGGSLRLSCAASGFNIKDTYIHWVRQAPGKGLEWVARIYPTNGYTRYADSVKGRFTISADTSKNTAYLQMNSLRAEDTAVYYCSRWGGDGFYAMDYWGQGTLVTVSSGGGGSGGGGSGGGGSDIQMTQSPSSLSASVGDRVTITCRASQDVNTAVAWYQQKPGKAPKLLIYSASFLYSGVPSRFSGSRSGTDFTLTISSLQPEDFATYYCQQHYTTPPTFGQGTKVEIK

SEQ ID NO: 177 - protein, 869 aa, Artificial Sequence
  Description of Artificial Sequence: Synthetic polypeptide
DASLPYLQKESVFQSGAHAYRIPALLYLPGQQSLLAFAEQRASKKDEHAELIVLRRGDYDAGTHQVQWQAQEVVAQARLDGHRSMNPCPLYDEQTGTLFLFFIAIPGQVTEQQQLQTRANVTRLCYVTSTDHGRTWSSPRDLTDAAIGPAYREWSTFAVGPGHCLQLHDRARSLVVPAYAYRKLHPKQRPIPSAFCFLSHDHGRTWARGHFVAQDTLECQVAEVETGEQRVVTLNARSHLRARVQAQSTNDGLDFQESQLVKKLVEPPPTGCQGSVISFPSPRSGPGSPAQWLLYTHPTHSWQRADLGAYLNPRPPAPEAWSEPVLLAKGSAAYSDLQSMGTGPDGSPLFGCLYEANDYEEIVFLMFTLKQAFPAEYLPQEPKSSDKTHTCPPCPAPELLGGPSVFLFPPKPKDTLMISRTPEVTCVVVDVSHEDPEVKFNWYVDGVEVHNAKTKPREEQYNSTYRVVSVLTVLHQDWLNGKEYKCKVSNKALPAPIEKTISKAKGQPREPQVYTLPPSREEMTKNQVSLTCLVKGFYPSDIAVEWESNGQPENNYKTTPPVLDSDGSFFLYSKLTVDKSRWQQGNVFSCSVMHEALHNHYTQKSLSLSPGKGGGGSGGGGSGGGGSEVQLVESGGGLVQPGGSLRLSCAASGFNIKDTYIHWVRQAPGKGLEWVARIYPTNGYTRYADSVKGRFTISADTSKNTAYLQMNSLRAEDTAVYYCSRWGGDGFYAMDYWGQGTLVTVSSGGGGSGGGGSGGGGSDIQMTQSPSSLSASVGDRVTITCRASQDVNTAVAWYQQKPGKAPKLLIYSASFLYSGVPSRFSGSRSGTDFTLTISSLQPEDFATYYCQQHYTTPPTFGQGTKVEIK

SEQ ID NO: 178 - protein, 869 aa, Artificial Sequence
  Description of Artificial Sequence: Synthetic polypeptide
DASLPYLQKESVFQSGAHAYRIPALLYLPGQQSLLAFAEQRASKKDEHAELIVLRRGDYDAGTHQVQWQAQEVVAQARLDGHRSMNPCPLYDEQTGTLFLFFIAIPGQVTEQQQLQTRANVTRLCYVTSTDHGRTWSSPRDLTDAAIGPAYREWSTFAVGPGHCLQLHDRARSLVVPAYAYRKLHPKQRPIPSAFCFLSHDHGRTWARGHFVAQDTLECQVAEVETGEQRVVTLNARSHLRFRVQAQSTNDGLDFQESQLVKKLVEPPPTGCQGSVISFPSPRSGPGSPAQWLLYTHPTHSWQRADLGAYLNPRPPAPEAWSEPVLLAKGSAAYSDLQSMGTGPDGSPLFGCLYEANDYEEIVFLMFTLKQAFPAEYLPQEPKSSDKTHTCPPCPAPELLGGPSVFLFPPKPKDTLMISRTPEVTCVVVDVSHEDPEVKFNWYVDGVEVHNAKTKPREEQYNSTYRVVSVLTVLHQDWLNGKEYKCKVSNKALPAPIEKTISKAKGQPREPQVYTLPPSREEMTKNQVSLTCLVKGFYPSDIAVEWESNGQPENNYKTTPPVLDSDGSFFLYSKLTVDKSRWQQGNVFSCSVMHEALHNHYTQKSLSLSPGKGGGGSGGGGSGGGGSEVQLVESGGGLVQPGGSLRLSCAASGFNIKDTYIHWVRQAPGKGLEWVARIYPTNGYTRYADSVKGRFTISADTSKNTAYLQMNSLRAEDTAVYYCSRWGGDGFYAMDYWGQGTLVTVSSGGGGSGGGGSGGGGSDIQMTQSPSSLSASVGDRVTITCRASQDVNTAVAWYQQKPGKAPKLLIYSASFLYSGVPSRFSGSRSGTDFTLTISSLQPEDFATYYCQQHYTTPPTFGQGTKVEIK

SEQ ID NO: 179 - protein, 874 aa, Artificial Sequence
  Description of Artificial Sequence: Synthetic polypeptide
  MOD_RES (1)..(1): Ala, Arg, Asn, Asp, Gln, Glu, Gly, His, Leu, Lys, Met, Phe, Thr, Val, or not present
  MOD_RES (6)..(6): Phe, Trp, Tyr or Val
  MOD_RES (9)..(9): Lys or Asp
  MOD_RES (62)..(62): Pro, Asn, Asp, His, Glu, Gly, Ser or Thr
  MOD_RES (93)..(93): Ala, Glu, or Lys
  MOD_RES (126)..(126): Gln, Leu, Glu, Phe, His, Ile, Leu, or Tyr
  MOD_RES (187)..(187): Arg, Ile, or Lys
  MOD_RES (242)..(242): Ala, Cys, Phe, Gly, His, Ile, Lys, Leu, Met, Asn, Gln, Arg, Ser, Val, Trp, or Tyr
  MOD_RES (270)..(270): Gln, Ala, His, Phe, Pro, Ser, or Thr
  MOD_RES (301)..(301): Ser, Arg, Ala, Asp, Glu, Phe, Gly, His, Ile, Lys, Leu, Met, Asn, Pro, Gln, Thr, Val, Trp, or Tyr
  MOD_RES (302)..(302): Trp, Lys, Ala, Asp, Glu, Phe, Gly, His, Ile, Lys, Leu, Met, Asn, Pro, Gln, Arg, Ser, Thr, Val, or Tyr
  MOD_RES (332)..(332): Ala, Cys, Ser, or Val
  MOD_RES (363)..(363): Val or Arg
  MOD_RES (365)..(365): Leu, Gln, His, Ile, Lys, or Ser
  MOD_RES (381)..(390): This region may encompass one of the following sequences: "GGGGS" or "GGGGSGGGGS" or "EPKSS"
XASLPXLQXESVFQSGAHAYRIPALLYLPGQQSLLAFAEQRASKKDEHAELIVLRRGDYDAXTHQVQWQAQEVVAQARLDGHRSMNPCPLYDXQTGTLFLFFIAIPGQVTEQQQLQTRANVTRLCXVTSTDHGRTWSSPRDLTDAAIGPAYREWSTFAVGPGHCLQLHDRARSLVVPAYAYRKLHPXQRPIPSAFCFLSHDHGRTWARGHFVAQDTLECQVAEVETGEQRVVTLNARSHLRXRVQAQSTNDGLDFQESQLVKKLVEPPPXGCQGSVISFPSPRSGPGSPAQWLLYTHPTHXXQRADLGAYLNPRPPAPEAWSEPVLLAKGSXAYSDLQSMGTGPDGSPLFGCLYEANDYEEIXFXMFTLKQAFPAEYLPQXXXXXXXXXXDKTHTCPPCPAPELLGGPSVFLFPPKPKDTLMISRTPEVTCVVVDVSHEDPEVKFNWYVDGVEVHNAKTKPREEQYNSTYRVVSVLTVLHQDWLNGKEYKCKVSNKALPAPIEKTISKAKGQPREPQVYTLPPSREEMTKNQVSLTCLVKGFYPSDIAVEWESNGQPENNYKTTPPVLDSDGSFFLYSKLTVDKSRWQQGNVFSCSVMHEALHNHYTQKSLSLSPGKGGGGSGGGGSGGGGSEVQLVESGGGLVQPGGSLRLSCAASGFNIKDTYIHWVRQAPGKGLEWVARIYPTNGYTRYADSVKGRFTISADTSKNTAYLQMNSLRAEDTAVYYCSRWGGDGFYAMDYWGQGTLVTVSSGGGGSGGGGSGGGGSDIQMTQSPSSLSASVGDRVTITCRASQDVNTAVAWYQQKPGKAPKLLIYSASFLYSGVPSRFSGSRSGTDFTLTISSLQPEDFATYYCQQHYTTPPTFGQGTKVEIK

SEQ ID NO: 180 - protein, 874 aa, Artificial Sequence
  Description of Artificial Sequence: Synthetic polypeptide
  MOD_RES (1)..(1): Ala, Arg, Asn, Asp, Gln, Glu, Gly, His, Leu, Lys, Met, Phe, Thr, Val, or not present
  MOD_RES (2)..(2): Ala or Lys
  MOD_RES (4)..(4): Asn or Leu
  MOD_RES (5)..(5): Pro or His
  MOD_RES (6)..(6): Phe, Trp, Tyr or Val
  MOD_RES (9)..(9): Lys or Asp
  MOD_RES (44)..(44): Lys, Arg, or Glu
  MOD_RES (45)..(45): Lys, Ala, Arg, or Glu
  MOD_RES (54)..(54): Leu or Met
  MOD_RES (62)..(62): Pro, Asn, Asp, His, Glu, Gly, Ser or Thr
  MOD_RES (69)..(69): Gln or His
  MOD_RES (78)..(78): Arg or Lys
  MOD_RES (80)..(80): Asp or Pro
  MOD_RES (93)..(93): Ala, Glu or Lys
  MOD_RES (107)..(107): Gly or Asp
  MOD_RES (108)..(108): Gln or His
  MOD_RES (112)..(112): Gln, Arg, or Lys
  MOD_RES (125)..(125): Ala, Cys, Ile, Ser, Val, or Leu
  MOD_RES (126)..(126): Gln, Leu, Glu, Phe, His, Ile, Leu, or Tyr
  MOD_RES (150)..(150): Ala or Val
  MOD_RES (164)..(164): Cys or Gly
  MOD_RES (170)..(170): Arg or Pro
  MOD_RES (171)..(171): Ala or Gly
  MOD_RES (187)..(187): Arg, Ile, or Lys
  MOD_RES (188)..(188): Gln or Pro
  MOD_RES (189)..(189): Arg or Pro
  MOD_RES (196)..(196): Ala, Cys, Leu, or Val
  MOD_RES (213)..(213): Ala, Cys, Asn, Ser, or Thr
  MOD_RES (217)..(217): Leu, Ala, or Val
  MOD_RES (225)..(225): Glu or Pro
  MOD_RES (239)..(239): His or Pro
  MOD_RES (240)..(240): Leu, Asp, Asn, or Tyr
  MOD_RES (241)..(241): Arg, Ala, Asp, Leu, Gln, or Tyr
  MOD_RES (242)..(242): Ala, Cys, Phe, Gly, His, Ile, Lys, Leu, Met, Asn, Gln, Arg, Ser, Val, Trp, or Tyr
  MOD_RES (244)..(244): Val, Ile, or Lys
  MOD_RES (249)..(249): Thr or Ala
  MOD_RES (251)..(251): Asp or Gly
  MOD_RES (257)..(257): Glu, Lys, or Pro
  MOD_RES (258)..(258): Ser or Cys
  MOD_RES (260)..(260): Leu, Asp, Phe, Gln, or Thr
  MOD_RES (265)..(265): Val or Phe
  MOD_RES (270)..(270): Gln, Ala, His, Phe, Pro, Ser, or Thr
  MOD_RES (272)..(272): Cys or Val
  MOD_RES (292)..(292): Trp or Arg
  MOD_RES (301)..(301): Ser, Arg, Ala, Asp, Glu, Phe, Gly, His, Ile, Lys, Leu, Met, Asn, Pro, Gln, Thr, Val, Trp, or Tyr
  MOD_RES (302)..(302): Trp, Lys, Ala, Asp, Glu, Phe, Gly, His, Ile, Lys, Leu, Met, Asn, Pro, Gln, Arg, Ser, Thr, Val, or Tyr
  MOD_RES (325)..(325): Lys or Val
  MOD_RES (332)..(332): Ala, Cys, Ser, or Val
  MOD_RES (352)..(352): Cys, Leu, or Val
  MOD_RES (363)..(363): Val or Arg
  MOD_RES (365)..(365): Leu, Gln, His, Ile, Lys, or Ser
  MOD_RES (381)..(390): This region may encompass one of the following sequences: "GGGGS" or "GGGGSGGGGS" or "EPKSS"
XXSXXXLQXESVFQSGAHAYRIPALLYLPGQQSLLAFAEQRASXXDEHAELIVXRRGDYDAXTHQVQWXAQEVVAQAXLXGHRSMNPCPLYDXQTGTLFLFFIAIPXXVTEXQQLQTRANVTRLXXVTSTDHGRTWSSPRDLTDAAIGPXYREWSTFAVGPGHXLQLHDXXRSLVVPAYAYRKLHPXXXPIPSAFXFLSHDHGRTWARGHFVXQDTXECQVAEVXTGEQRVVTLNARSXXXXRXQAQSXNXGLDFQXXQXVKKLXEPPPXGXQGSVISFPSPRSGPGSPAQXLLYTHPTHXXQRADLGAYLNPRPPAPEAWSEPXLLAKGSXAYSDLQSMGTGPDGSPLFGXLYEANDYEEIXFXMFTLKQAFPAEYLPQXXXXXXXXXXDKTHTCPPCPAPELLGGPSVFLFPPKPKDTLMISRTPEVTCVVVDVSHEDPEVKFNWYVDGVEVHNAKTKPREEQYNSTYRVVSVLTVLHQDWLNGKEYKCKVSNKALPAPIEKTISKAKGQPREPQVYTLPPSREEMTKNQVSLTCLVKGFYPSDIAVEWESNGQPENNYKTTPPVLDSDGSFFLYSKLTVDKSRWQQGNVFSCSVMHEALHNHYTQKSLSLSPGKGGGGSGGGGSGGGGSEVQLVESGGGLVQPGGSLRLSCAASGFNIKDTYIHWVRQAPGKGLEWVARIYPTNGYTRYADSVKGRFTISADTSKNTAYLQMNSLRAEDTAVYYCSRWGGDGFYAMDYWGQGTLVTVSSGGGGSGGGGSGGGGSDIQMTQSPSSLSASVGDRVTITCRASQDVNTAVAWYQQKPGKAPKLLIYSASFLYSGVPSRFSGSRSGTDFTLTISSLQPEDFATYYCQQHYTTPPTFGQGTKVEIK

SEQ ID NO: 181 - DNA, 1140 bp, Artificial Sequence
  Description of Artificial Sequence: Synthetic polynucleotide
gatgcatctctgccttacctgcagaaagaaagcgtgttccagtctggcgcccacgcctacagaattcccgctctgctgtatctgccaggccagcagtctctgctggctttcgctgaacagcgggccagcaagaaggatgagcacgccgaactgatcgtgctgcggagaggcgattacgacgccggcacacatcaggtgcagtggcaggctcaagaggtggtggctcaggctagactggacggccacagatctatgaacccctgtcctctgtacgatgaacagaccggcacactgtttctgttctttatcgctatccccggccaagtgaccgagcagcagcagctgcagacaagagccaacgtgaccagactgtgttacgtgacctccaccgaccacggcagaacctggtctagccctagagatctgaccgacgccgccatcggacctgcctatagagagtggtccaccttcgccgttggacctggacactgtctccagctgcacgacagggctagatctctggtggtgcctgcctacgcctatagaaagctgcaccccaaacagcggcctattcctagcgccttctgctttctgagccacgatcacggcaggacatgggccagaggacatttcgtggcccaggacacactggaatgccaggtggccgaagtggaaaccggcgagcagagagtcgtgaccctgaacgccagatctcacctgagattcagagtgcaggcccagagcacaaacgacggcctggatttccaagagagccagctggtcaagaaactggtggaacctcctccaaccggctgtcagggaagcgtgatcagctttccatctcctagaagcggccctggctctcctgctcagtggctgctgtatacacaccccacacacagctggcagagagccgatctgggcgcctacctgaatcctagacctcctgctcctgaggcttggagcgaacctgttctgctggccaagggcagcgctgcctacagcgatctgcagtctatgggcacaggccctgatggcagccctctgtttggctgtctgtacgaggccaacgactacgaagagatcgtgttcctgatgttcaccctgaagcaggcctttccagccgagtacctgcctcaa

SEQ ID NO: 182 - protein, 380 aa, Artificial Sequence
  Description of Artificial Sequence: Synthetic polypeptide
  MOD_RES (1)..(1): Ala, Arg, Asn, Asp, Gln, Glu, Gly, His, Leu, Lys, Met, Phe, Thr, Val, or not present
  MOD_RES (2)..(2): Ala or Lys
  MOD_RES (4)..(4): Asn or Leu
  MOD_RES (5)..(5): Pro or His
  MOD_RES (6)..(6): Phe, Trp, Tyr or Val
  MOD_RES (9)..(9): Lys or Asp
  MOD_RES (44)..(44): Lys, Arg, or Glu
  MOD_RES (45)..(45): Lys, Ala, Arg, or Glu
  MOD_RES (54)..(54): Leu or Met
  MOD_RES (62)..(62): Pro, Asn, Asp, His, Glu, Gly, Ser or Thr
  MOD_RES (69)..(69): Gln or His
  MOD_RES (78)..(78): Arg or Lys
  MOD_RES (80)..(80): Asp or Pro
  MOD_RES (93)..(93): Ala, Glu or Lys
  MOD_RES (107)..(107): Gly or Asp
  MOD_RES (108)..(108): Gln or His
  MOD_RES (112)..(112): Gln, Arg, or Lys
  MOD_RES (125)..(125): Ala, Cys, Ile, Ser, Val, or Leu
  MOD_RES (126)..(126): Gln, Leu, Glu, Phe, His, Ile, Leu, or Tyr
  MOD_RES (150)..(150): Ala or Val
  MOD_RES (164)..(164): Cys or Gly
  MOD_RES (170)..(170): Arg or Pro
  MOD_RES (171)..(171): Ala or Gly
  MOD_RES (187)..(187): Arg, Ile, or Lys
  MOD_RES (188)..(188): Gln or Pro
  MOD_RES (189)..(189): Arg or Pro
  MOD_RES (196)..(196): Ala, Cys, Leu, or Val
  MOD_RES (213)..(213): Ala, Cys, Asn, Ser, or Thr
  MOD_RES (217)..(217): Leu, Ala, or Val
  MOD_RES (225)..(225): Glu or Pro
  MOD_RES (239)..(239): His or Pro
  MOD_RES (240)..(240): Leu, Asp, Asn, or Tyr
  MOD_RES (241)..(241): Arg, Ala, Asp, Leu, Gln, or Tyr
  MOD_RES (242)..(242): Ala, Cys, Phe, Gly, His, Ile, Lys, Leu, Met, Asn, Gln, Arg, Ser, Val, Trp, or Tyr
  MOD_RES (244)..(244): Val, Ile, or Lys
  MOD_RES (249)..(249): Thr or Ala
  MOD_RES (251)..(251): Asp or Gly
  MOD_RES (257)..(257): Glu, Lys, or Pro
  MOD_RES (258)..(258): Ser or Cys
  MOD_RES (260)..(260): Leu, Asp, Phe, Gln, or Thr
  MOD_RES (265)..(265): Val or Phe
  MOD_RES (270)..(270): Gln, Ala, His, Phe, Pro, Ser, or Thr
  MOD_RES (272)..(272): Cys or Val
  MOD_RES (292)..(292): Trp or Arg
  MOD_RES (301)..(301): Ser, Arg, Ala, Asp, Glu, Phe, Gly, His, Ile, Lys, Leu, Met, Asn, Pro, Gln, Thr, Val, Trp, or Tyr
  MOD_RES (302)..(302): Trp, Lys, Ala, Asp, Glu, Phe, Gly, His, Ile, Lys, Leu, Met, Asn, Pro, Gln, Arg, Ser, Thr, Val, or Tyr
  MOD_RES (325)..(325): Lys or Val
  MOD_RES (332)..(332): Ala, Cys, Ser, or Val
  MOD_RES (352)..(352): Cys, Leu, or Val
  MOD_RES (363)..(363): Val or Arg
  MOD_RES (365)..(365): Leu, Gln, His, Ile, Lys, or Ser
XXSXXXLQXESVFQSGAHAYRIPALLYLPGQQSLLAFAEQRASXXDEHAELIVXRRGDYDAXTHQVQWXAQEVVAQAXLXGHRSMNPCPLYDXQTGTLFLFFIAIPXXVTEXQQLQTRANVTRLXXVTSTDHGRTWSSPRDLTDAAIGPXYREWSTFAVGPGHXLQLHDXXRSLVVPAYAYRKLHPXXXPIPSAFXFLSHDHGRTWARGHFVXQDTXECQVAEVXTGEQRVVTLNARSXXXXRXQAQSXNXGLDFQXXQXVKKLXEPPPXGXQGSVISFPSPRSGPGSPAQXLLYTHPTHXXQRADLGAYLNPRPPAPEAWSEPXLLAKGSXAYSDLQSMGTGPDGSPLFGXLYEANDYEEIXFXMFTLKQAFPAEYLPQ

SEQ ID NO: 183 - protein, 380 aa, Artificial Sequence
  Description of Artificial Sequence: Synthetic polypeptide
  MOD_RES (1)..(1): Ala, Arg, Asn, Asp, Gln, Glu, Gly, His, Leu, Lys, Met, Phe, Thr, Val, or not present
  MOD_RES (6)..(6): Phe, Trp, Tyr or Val
  MOD_RES (9)..(9): Lys or Asp
  MOD_RES (62)..(62): Pro, Asn, Asp, His, Glu, Gly, Ser or Thr
  MOD_RES (93)..(93): Ala, Glu, or Lys
  MOD_RES (126)..(126): Gln, Leu, Glu, Phe, His, Ile, Leu, or Tyr
  MOD_RES (187)..(187): Arg, Ile, or Lys
  MOD_RES (242)..(242): Ala, Cys, Phe, Gly, His, Ile, Lys, Leu, Met, Asn, Gln, Arg, Ser, Val, Trp, or Tyr
  MOD_RES (270)..(270): Gln, Ala, His, Phe, Pro, Ser, or Thr
  MOD_RES (301)..(301): Ser, Arg, Ala, Asp, Glu, Phe, Gly, His, Ile, Lys, Leu, Met, Asn, Pro, Gln, Thr, Val, Trp, or Tyr
  MOD_RES (302)..(302): Trp, Lys, Ala, Asp, Glu, Phe, Gly, His, Ile, Lys, Leu, Met, Asn, Pro, Gln, Arg, Ser, Thr, Val, or Tyr
  MOD_RES (332)..(332): Ala, Cys, Ser, or Val
  MOD_RES (363)..(363): Val or Arg
  MOD_RES (365)..(365): Leu, Gln, His, Ile, Lys, or Ser
XASLPXLQXESVFQSGAHAYRIPALLYLPGQQSLLAFAEQRASKKDEHAELIVLRRGDYDAXTHQVQWQAQEVVAQARLDGHRSMNPCPLYDXQTGTLFLFFIAIPGQVTEQQQLQTRANVTRLCXVTSTDHGRTWSSPRDLTDAAIGPAYREWSTFAVGPGHCLQLHDRARSLVVPAYAYRKLHPXQRPIPSAFCFLSHDHGRTWARGHFVAQDTLECQVAEVETGEQRVVTLNARSHLRXRVQAQSTNDGLDFQESQLVKKLVEPPPXGCQGSVISFPSPRSGPGSPAQWLLYTHPTHXXQRADLGAYLNPRPPAPEAWSEPVLLAKGSXAYSDLQSMGTGPDGSPLFGCLYEANDYEEIXFXMFTLKQAFPAEYLPQ

SEQ ID NO: 184 - protein, 5 aa, Artificial Sequence
  Description of Artificial Sequence: Synthetic peptide
GGGGS

SEQ ID NO: 185 - protein, 612 aa, Artificial Sequence
  Description of Artificial Sequence: Synthetic polypeptide
DASLPYLQKESVFQSGAHAYRIPALLYLPGQQSLLAFAEQRASKKDEHAELIVLRRGDYDAGTHQVQWQAQEVVAQARLDGHRSMNPCPLYDEQTGTLFLFFIAIPGQVTEQQQLQTRANVTRLCYVTSTDHGRTWSSPRDLTDAAIGPAYREWSTFAVGPGHCLQLHDRARSLVVPAYAYRKLHPKQRPIPSAFCFLSHDHGRTWARGHFVAQDTLECQVAEVETGEQRVVTLNARSHLRARVQAQSTNDGLDFQESQLVKKLVEPPPTGCQGSVISFPSPRSGPGSPAQWLLYTHPTHSWQRADLGAYLNPRPPAPEAWSEPVLLAKGSAAYSDLQSMGTGPDGSPLFGCLYEANDYEEIVFLMFTLKQAFPAEYLPQEPKSSDKTHTCPPCPAPELLGGPSVFLFPPKPKDTLMISRTPEVTCVVVDVSHEDPEVKFNWYVDGVEVHNAKTKPREEQYNSTYRVVSVLTVLHQDWLNGKEYKCKVSNKALPAPIEKTISKAKGQPREPQVYTLPPSREEMTKNQVSLYCLVKGFYPSDIAVEWESNGQPENNYKTTPPVLDSDGSFFLYSKLTVDKSRWQQGNVFSCSVMHEALHNHYTQKSLSLSPGK

SEQ ID NO: 186 - DNA, 1836 bp, Artificial Sequence
  Description of Artificial Sequence: Synthetic polynucleotide
gatgcatctctgccttacctgcagaaagaaagcgtgttccagtctggcgcccacgcctacagaattcccgctctgctgtatctgccaggccagcagtctctgctggctttcgctgaacagcgggccagcaagaaggatgagcacgccgaactgatcgtgctgcggagaggcgattacgacgccggcacacatcaggtgcagtggcaggctcaagaggtggtggctcaggctagactggacggccacagatctatgaacccctgtcctctgtacgatgaacagaccggcacactgtttctgttctttatcgctatccccggccaagtgaccgagcagcagcagctgcagacaagagccaacgtgaccagactgtgttacgtgacctccaccgaccacggcagaacctggtctagccctagagatctgaccgacgccgccatcggacctgcctatagagagtggtccaccttcgccgttggacctggacactgtctccagctgcacgacagggctagatctctggtggtgcctgcctacgcctatagaaagctgcaccccaaacagcggcctattcctagcgccttctgctttctgagccacgatcacggcaggacatgggccagaggacatttcgtggcccaggacacactggaatgccaggtggccgaagtggaaaccggcgagcagagagtcgtgaccctgaacgccagatctcacctgagagccagagtgcaggcccagagcacaaacgacggcctggatttccaagagagccagctggtcaagaaactggtggaacctcctccaaccggctgtcagggaagcgtgatcagctttccatctcctagaagcggccctggctctcctgctcagtggctgctgtatacacaccccacacacagctggcagagagccgatctgggcgcctacctgaatcctagacctcctgctcctgaggcttggagcgaacctgttctgctggccaagggcagcgctgcctacagcgatctgcagtctatgggcacaggccctgatggcagccctctgtttggctgtctgtacgaggccaacgactacgaagagatcgtgttcctgatgttcaccctgaagcaggcctttccagccgagtacctgcctcaagagcccaaatcttctgacaaaactcacacatgcccaccgtgcccagcacctgaactcctggggggaccgtcagtcttcctcttccccccaaaacccaaggacaccctcatgatctcccggacccctgaggtcacatgcgtggtggtggacgtgagccacgaagaccctgaggtcaagttcaactggtacgtggacggcgtggaggtgcataatgccaagacaaagccgcgggaggagcagtacaacagcacgtaccgtgtggtcagcgtcctcaccgtcctgcaccaggactggctgaatggcaaggagtacaagtgcaaggtctccaacaaagccctcccagcccccatcgagaaaaccatctccaaagccaaagggcagccccgagaaccacaggtctacaccctgcccccatcccgggaggagatgaccaagaaccaggtcagcctgtactgcctggtcaaaggcttctatcccagcgacatcgccgtggagtgggagagcaatgggcagccggagaacaactacaagaccacgcctcccgtgctggactccgacggctccttcttcctctatagcaagctcaccgtggacaagagcaggtggcagcaggggaacgtcttctcatgctccgtgatgcatgaggctctgcacaaccactacacgcagaagagcctctccctgtctccgggtaaa

SEQ ID NO: 187 - protein, 612 aa, Artificial Sequence
  Description of Artificial Sequence: Synthetic polypeptide
DASLPYLQKESVFQSGAHAYRIPALLYLPGQQSLLAFAEQRASKKDEHAELIVLRRGDYDAGTHQVQWQAQEVVAQARLDGHRSMNPCPLYDEQTGTLFLFFIAIPGQVTEQQQLQTRANVTRLCYVTSTDHGRTWSSPRDLTDAAIGPAYREWSTFAVGPGHCLQLHDRARSLVVPAYAYRKLHPKQRPIPSAFCFLSHDHGRTWARGHFVAQDTLECQVAEVETGEQRVVTLNARSHLRFRVQAQSTNDGLDFQESQLVKKLVEPPPTGCQGSVISFPSPRSGPGSPAQWLLYTHPTHSWQRADLGAYLNPRPPAPEAWSEPVLLAKGSAAYSDLQSMGTGPDGSPLFGCLYEANDYEEIVFLMFTLKQAFPAEYLPQEPKSSDKTHTCPPCPAPELLGGPSVFLFPPKPKDTLMISRTPEVTCVVVDVSHEDPEVKFNWYVDGVEVHNAKTKPREEQYNSTYRVVSVLTVLHQDWLNGKEYKCKVSNKALPAPIEKTISKAKGQPREPQVYTLPPSREEMTKNQVSLYCLVKGFYPSDIAVEWESNGQPENNYKTTPPVLDSDGSFFLYSKLTVDKSRWQQGNVFSCSVMHEALHNHYTQKSLSLSPGK

SEQ ID NO: 188 - DNA, 1836 bp, Artificial Sequence
  Description of Artificial Sequence: Synthetic polynucleotide
gatgcatctctgccttacctgcagaaagaaagcgtgttccagtctggcgcccacgcctacagaattcccgctctgctgtatctgccaggccagcagtctctgctggctttcgctgaacagcgggccagcaagaaggatgagcacgccgaactgatcgtgctgcggagaggcgattacgacgccggcacacatcaggtgcagtggcaggctcaagaggtggtggctcaggctagactggacggccacagatctatgaacccctgtcctctgtacgatgaacagaccggcacactgtttctgttctttatcgctatccccggccaagtgaccgagcagcagcagctgcagacaagagccaacgtgaccagactgtgttacgtgacctccaccgaccacggcagaacctggtctagccctagagatctgaccgacgccgccatcggacctgcctatagagagtggtccaccttcgccgttggacctggacactgtctccagctgcacgacagggctagatctctggtggtgcctgcctacgcctatagaaagctgcaccccaaacagcggcctattcctagcgccttctgctttctgagccacgatcacggcaggacatgggccagaggacatttcgtggcccaggacacactggaatgccaggtggccgaagtggaaaccggcgagcagagagtcgtgaccctgaacgccagatctcacctgagattcagagtgcaggcccagagcacaaacgacggcctggatttccaagagagccagctggtcaagaaactggtggaacctcctccaaccggctgtcagggaagcgtgatcagctttccatctcctagaagcggccctggctctcctgctcagtggctgctgtatacacaccccacacacagctggcagagagccgatctgggcgcctacctgaatcctagacctcctgctcctgaggcttggagcgaacctgttctgctggccaagggcagcgctgcctacagcgatctgcagtctatgggcacaggccctgatggcagccctctgtttggctgtctgtacgaggccaacgactacgaagagatcgtgttcctgatgttcaccctgaagcaggcctttccagccgagtacctgcctcaagagcccaaatcttctgacaaaactcacacatgcccaccgtgcccagcacctgaactcctggggggaccgtcagtcttcctcttccccccaaaacccaaggacaccctcatgatctcccggacccctgaggtcacatgcgtggtggtggacgtgagccacgaagaccctgaggtcaagttcaactggtacgtggacggcgtggaggtgcataatgccaagacaaagccgcgggaggagcagtacaacagcacgtaccgtgtggtcagcgtcctcaccgtcctgcaccaggactggctgaatggcaaggagtacaagtgcaaggtctccaacaaagccctcccagcccccatcgagaaaaccatctccaaagccaaagggcagccccgagaaccacaggtctacaccctgcccccatcccgggaggagatgaccaagaaccaggtcagcctgtactgcctggtcaaaggcttctatcccagcgacatcgccgtggagtgggagagcaatgggcagccggagaacaactacaagaccacgcctcccgtgctggactccgacggctccttcttcctctatagcaagctcaccgtggacaagagcaggtggcagcaggggaacgtcttctcatgctccgtgatgcatgaggctctgcacaaccactacacgcagaagagcctctccctgtctccgggtaaa

SEQ ID NO: 189 - protein, 450 aa, Artificial Sequence
  Description of Artificial Sequence: Synthetic polypeptide
EVQLVESGGGLVQPGGSLRLSCAASGFNIKDTYIHWVRQAPGKGLEWVARIYPTNGYTRYADSVKGRFTISADTSKNTAYLQMNSLRAEDTAVYYCSRWGGDGFYAMDYWGQGTLVTVSSASTKGPSVFPLAPSSKSTSGGTAALGCLVKDYFPEPVTVSWNSGALTSGVHTFPAVLQSSGLYSLSSVVTVPSSSLGTQTYICNVNHKPSNTKVDKKVEPKSCDKTHTCPPCPAPELLGGPSVFLFPPKPKDTLMISRTPEVTCVVVDVSHEDPEVKFNWYVDGVEVHNAKTKPREEQYNSTYRVVSVLTVLHQDWLNGKEYKCKVSNKALPAPIEKTISKAKGQPREPQVYTLPPSREEMTKNQVSLTCLVKGFYPSDIAVEWESNGQPENNYKTTPPVLDSDGSFFLTSKLTVDKSRWQQGNVFSCSVMHEALHNHYTQKSLSLSPGK

SEQ ID NO: 190 - DNA, 1350 bp, Artificial Sequence
  Description of Artificial Sequence: Synthetic polynucleotide
gaggtgcagctggttgaatctggcggaggactggttcagcctggcggatctctgagactgtcttgtgccgccagcggcttcaacatcaaggacacctacatccactgggtccgacaggcccctggcaaaggacttgaatgggtcgccagaatctaccccaccaacggctacaccagatacgccgactctgtgaagggcagattcaccatcagcgccgacaccagcaagaacaccgcctacctgcagatgaacagcctgagagccgaggacaccgccgtgtactactgttctagatggggaggcgacggcttctacgccatggattattggggccagggcaccctggtcaccgtttcttctgctagcaccaagggcccatccgtcttccccctggcaccctcctccaagagcacctctgggggcacagcggccctgggctgcctggtcaaggactacttccccgaaccggtgacggtgtcctggaactcaggcgctctgaccagcggcgtgcacaccttcccggctgtcctacagtcctcaggactctactccctcagcagcgtggtgaccgtgccctccagcagcttgggcacccagacctacatctgcaacgtgaatcacaagcccagcaacaccaaggtggacaagaaagttgagcccaaatcttgtgacaaaactcacacatgcccaccgtgcccagcacctgaactcctggggggaccgtcagtcttcctcttccccccaaaacccaaggacaccctcatgatctcccggacccctgaggtcacatgcgtggtggtggacgtgagccacgaagaccctgaggtcaagttcaactggtacgtggacggcgtggaggtgcataatgccaagacaaagccgcgggaggagcagtacaacagcacgtaccgtgtggtcagcgtcctcaccgtcctgcaccaggactggctgaatggcaaggagtacaagtgcaaggtctccaacaaagccctcccagcccccatcgagaaaaccatctccaaagccaaagggcagccccgagaaccacaggtctacaccctgcccccatcccgggaggagatgaccaagaaccaggtcagcctgacctgcctggtcaaaggcttctatcccagcgacatcgccgtggagtgggagagcaatgggcagccggagaacaactacaagaccacgcctcccgtgctggactccgacggctccttcttcctcactagcaagctcaccgtggacaagagcaggtggcagcaggggaacgtcttctcatgctccgtgatgcatgaggctctgcacaaccactacacgcagaagagcctctccctgtctccgggtaaa

SEQ ID NO: 191 - protein, 380 aa, Artificial Sequence
  Description of Artificial Sequence: Synthetic polypeptide
DASLPYLQKESVFQSGAHAYRIPALLYLPGQQSLLAFAEQRASKKDEHAELIVLRRGDYDAGTHQVQWQAQEVVAQARLDGHRSMNPCPLYDEQTGTLFLFFIAIPGQVTEQQQLQTRANVTRLCYVTSTDHGRTWSSPRDLTDAAIGPAYREWSTFAVGPGHCLQLHDRARSLVVPAYAYRKLHPKQRPIPSAFCFLSHDHGRTWARGHFVAQDTLECQVAEVETGEQRVVTLNARSHLRARVQAQSTNDGLDFQESQLVKKLVEPPPQGCQGSVISFPSPRSGPGSPAQWLLYTHPTHSWQRADLGAYLNPRPPAPEAWSEPVLLAKGSAAYSDLQSMGTGPDGSPLFGCLYEANDYEEIVFLMFTLKQAFPAEYLPQ

SEQ ID NO: 192 - protein, 612 aa, Artificial Sequence
  Description of Artificial Sequence: Synthetic polypeptide
DASLPYLQKESVFQSGAHAYRIPALLYLPGQQSLLAFAEQRASKKDEHAELIVLRRGDYDAGTHQVQWQAQEVVAQARLDGHRSMNPCPLYDEQTGTLFLFFIAIPGQVTEQQQLQTRANVTRLCYVTSTDHGRTWSSPRDLTDAAIGPAYREWSTFAVGPGHCLQLHDRARSLVVPAYAYRKLHPKQRPIPSAFCFLSHDHGRTWARGHFVAQDTLECQVAEVETGEQRVVTLNARSHLRARVQAQSTNDGLDFQESQLVKKLVEPPPQGCQGSVISFPSPRSGPGSPAQWLLYTHPTHSWQRADLGAYLNPRPPAPEAWSEPVLLAKGSAAYSDLQSMGTGPDGSPLFGCLYEANDYEEIVFLMFTLKQAFPAEYLPQEPKSSDKTHTCPPCPAPELLGGPSVFLFPPKPKDTLMISRTPEVTCVVVDVSHEDPEVKFNWYVDGVEVHNAKTKPREEQYNSTYRVVSVLTVLHQDWLNGKEYKCKVSNKALPAPIEKTISKAKGQPREPQVYTLPPSREEMTKNQVSLTCLVKGFYPSDIAVEWESNGQPENNYKTTPPVLDSDGSFFLTSKLTVDKSRWQQGNVFSCSVMHEALHNHYTQKSLSLSPGK

SEQ ID NO: 193 - protein, 612 aa, Artificial Sequence
  Description of Artificial Sequence: Synthetic polypeptide
DASLPYLQKESVFQSGAHAYRIPALLYLPGQQSLLAFAEQRASKKDEHAELIVLRRGDYDAGTHQVQWQAQEVVAQARLDGHRSMNPCPLYDEQTGTLFLFFIAIPGQVTEQQQLQTRANVTRLCYVTSTDHGRTWSSPRDLTDAAIGPAYREWSTFAVGPGHCLQLHDRARSLVVPAYAYRKLHPKQRPIPSAFCFLSHDHGRTWARGHFVAQDTLECQVAEVETGEQRVVTLNARSHLRARVQAQSTNDGLDFQESQLVKKLVEPPPQGCQGSVISFPSPRSGPGSPAQWLLYTHPTHSWQRADLGAYLNPRPPAPEAWSEPVLLAKGSAAYSDLQSMGTGPDGSPLFGCLYEANDYEEIVFLMFTLKQAFPAEYLPQEPKSSDKTHTCPPCPAPELLGGPSVFLFPPKPKDTLMISRTPEVTCVVVDVSHEDPEVKFNWYVDGVEVHNAKTKPREEQYNSTYRVVSVLTVLHQDWLNGKEYKCKVSNKALPAPIEKTISKAKGQPREPQVYTLPPSREEMTKNQVSLTCLVKGFYPSDIAVEWESNGQPENNYKTTPPVLDSDGSFFLYSKLTVDKSRWQQGNVFSCSVMHEALHNHYTQKSLSLSPGK

SEQ ID NO: 194 - protein, 869 aa, Artificial Sequence
  Description of Artificial Sequence: Synthetic polypeptide
DASLPYLQKESVFQSGAHAYRIPALLYLPGQQSLLAFAEQRASKKDEHAELIVLRRGDYDAGTHQVQWQAQEVVAQARLDGHRSMNPCPLYDEQTGTLFLFFIAIPGQVTEQQQLQTRANVTRLCYVTSTDHGRTWSSPRDLTDAAIGPAYREWSTFAVGPGHCLQLHDRARSLVVPAYAYRKLHPKQRPIPSAFCFLSHDHGRTWARGHFVAQDTLECQVAEVETGEQRVVTLNARSHLRARVQAQSTNDGLDFQESQLVKKLVEPPPQGCQGSVISFPSPRSGPGSPAQWLLYTHPTHSWQRADLGAYLNPRPPAPEAWSEPVLLAKGSAAYSDLQSMGTGPDGSPLFGCLYEANDYEEIVFLMFTLKQAFPAEYLPQEPKSSDKTHTCPPCPAPELLGGPSVFLFPPKPKDTLMISRTPEVTCVVVDVSHEDPEVKFNWYVDGVEVHNAKTKPREEQYNSTYRVVSVLTVLHQDWLNGKEYKCKVSNKALPAPIEKTISKAKGQPREPQVYTLPPSREEMTKNQVSLTCLVKGFYPSDIAVEWESNGQPENNYKTTPPVLDSDGSFFLYSKLTVDKSRWQQGNVFSCSVMHEALHNHYTQKSLSLSPGKGGGGSGGGGSGGGGSEVQLVESGGGLVQPGGSLRLSCAASGFNIKDTYIHWVRQAPGKGLEWVARIYPTNGYTRYADSVKGRFTISADTSKNTAYLQMNSLRAEDTAVYYCSRWGGDGFYAMDYWGQGTLVTVSSGGGGSGGGGSGGGGSDIQMTQSPSSLSASVGDRVTITCRASQDVNTAVAWYQQKPGKAPKLLIYSASFLYSGVPSRFSGSRSGTDFTLTISSLQPEDFATYYCQQHYTTPPTFGQGTKVEIK

SEQ ID NO: 195 - protein, 617 aa, Artificial Sequence
  Description of Artificial Sequence: Synthetic polypeptide
DASLPYLQKESVFQSGAHAYRIPALLYLPGQQSLLAFAEQRASKKDEHAELIVLRRGDYDAGTHQVQWQAQEVVAQARLDGHRSMNPCPLYDEQTGTLFLFFIAIPGQVTEQQQLQTRANVTRLCYVTSTDHGRTWSSPRDLTDAAIGPAYREWSTFAVGPGHCLQLHDRARSLVVPAYAYRKLHPKQRPIPSAFCFLSHDHGRTWARGHFVAQDTLECQVAEVETGEQRVVTLNARSHLRARVQAQSTNDGLDFQESQLVKKLVEPPPQGCQGSVISFPSPRSGPGSPAQWLLYTHPTHSWQRADLGAYLNPRPPAPEAWSEPVLLAKGSAAYSDLQSMGTGPDGSPLFGCLYEANDYEEIVFLMFTLKQAFPAEYLPQGGGGSGGGGSDKTHTCPPCPAPELLGGPSVFLFPPKPKDTLMISRTPEVTCVVVDVSHEDPEVKFNWYVDGVEVHNAKTKPREEQYNSTYRVVSVLTVLHQDWLNGKEYKCKVSNKALPAPIEKTISKAKGQPREPQVYTLPPSREEMTKNQVSLTCLVKGFYPSDIAVEWESNGQPENNYKTTPPVLDSDGSFFLTSKLTVDKSRWQQGNVFSCSVMHEALHNHYTQKSLSLSPGK

SEQ ID NO: 196 - protein, 617 aa, Artificial Sequence
  Description of Artificial Sequence: Synthetic polypeptide
DASLPYLQKESVFQSGAHAYRIPALLYLPGQQSLLAFAEQRASKKDEHAELIVLRRGDYDAGTHQVQWQAQEVVAQARLDGHRSMNPCPLYDEQTGTLFLFFIAIPGQVTEQQQLQTRANVTRLCYVTSTDHGRTWSSPRDLTDAAIGPAYREWSTFAVGPGHCLQLHDRARSLVVPAYAYRKLHPKQRPIPSAFCFLSHDHGRTWARGHFVAQDTLECQVAEVETGEQRVVTLNARSHLRARVQAQSTNDGLDFQESQLVKKLVEPPPQGCQGSVISFPSPRSGPGSPAQWLLYTHPTHSWQRADLGAYLNPRPPAPEAWSEPVLLAKGSAAYSDLQSMGTGPDGSPLFGCLYEANDYEEIVFLMFTLKQAFPAEYLPQGGGGSGGGGSDKTHTCPPCPAPELLGGPSVFLFPPKPKDTLMISRTPEVTCVVVDVSHEDPEVKFNWYVDGVEVHNAKTKPREEQYNSTYRVVSVLTVLHQDWLNGKEYKCKVSNKALPAPIEKTISKAKGQPREPQVYTLPPSREEMTKNQVSLTCLVKGFYPSDIAVEWESNGQPENNYKTTPPVLDSDGSFFLYSKLTVDKSRWQQGNVFSCSVMHEALHNHYTQKSLSLSPGK

SEQ ID NO: 197 - protein, 874 aa, Artificial Sequence
  Description of Artificial Sequence: Synthetic polypeptide
DASLPYLQKESVFQSGAHAYRIPALLYLPGQQSLLAFAEQRASKKDEHAELIVLRRGDYDAGTHQVQWQAQEVVAQARLDGHRSMNPCPLYDEQTGTLFLFFIAIPGQVTEQQQLQTRANVTRLCYVTSTDHGRTWSSPRDLTDAAIGPAYREWSTFAVGPGHCLQLHDRARSLVVPAYAYRKLHPKQRPIPSAFCFLSHDHGRTWARGHFVAQDTLECQVAEVETGEQRVVTLNARSHLRARVQAQSTNDGLDFQESQLVKKLVEPPPQGCQGSVISFPSPRSGPGSPAQWLLYTHPTHSWQRADLGAYLNPRPPAPEAWSEPVLLAKGSAAYSDLQSMGTGPDGSPLFGCLYEANDYEEIVFLMFTLKQAFPAEYLPQGGGGSGGGGSDKTHTCPPCPAPELLGGPSVFLFPPKPKDTLMISRTPEVTCVVVDVSHEDPEVKFNWYVDGVEVHNAKTKPREEQYNSTYRVVSVLTVLHQDWLNGKEYKCKVSNKALPAPIEKTISKAKGQPREPQVYTLPPSREEMTKNQVSLTCLVKGFYPSDIAVEWESNGQPENNYKTTPPVLDSDGSFFLYSKLTVDKSRWQQGNVFSCSVMHEALHNHYTQKSLSLSPGKGGGGSGGGGSGGGGSEVQLVESGGGLVQPGGSLRLSCAASGFNIKDTYIHWVRQAPGKGLEWVARIYPTNGYTRYADSVKGRFTISADTSKNTAYLQMNSLRAEDTAVYYCSRWGGDGFYAMDYWGQGTLVTVSSGGGGSGGGGSGGGGSDIQMTQSPSSLSASVGDRVTITCRASQDVNTAVAWYQQKPGKAPKLLIYSASFLYSGVPSRFSGSRSGTDFTLTISSLQPEDFATYYCQQHYTTPPTFGQGTKVEIK

SEQ ID NO: 198 - protein, 380 aa, Artificial Sequence
  Description of Artificial Sequence: Synthetic polypeptide
DASLPYLQKESVFQSGAHAYRIPALLYLPGQQSLLAFAEQRRSKKDEHAELIVLRRGDYDAGTHQVQWQAQEVVAQARLDGHRSMNPCPLYDEQTGTLFLFFIAIPGQVTEQQQLQTRANVTRLCYVTSTDHGRTWSSPRDLTDAAIGPAYREWSTFAVGPGHCLQLHDRARSLVVPAYAYRKLHPKQRPIPSAFCFLSHDHGRTWARGHFVAQDTLECQVAEVETGEQRVVTLNARSHLRFRVQAQSTNDGLDFQESQLVKKLVEPPPTGCQGSVISFPSPRSGPGSPAQWLLYTHPTHSWQRADLGAYLNPRPPAPEAWSEPVLLAKGSAAYSDLQSMGTGPDGSPLFGCLYEANDYEEIVFLMFTLKQAFPAEYLPQ

SEQ ID NO: 199 - protein, 380 aa, Artificial Sequence
  Description of Artificial Sequence: Synthetic polypeptide
  MOD_RES (1)..(1): Ala, Arg, Asn, Asp, Gln, Glu, Gly, His, Leu, Lys, Met, Phe, Thr, Val, or not present
  MOD_RES (2)..(2): Ala or Lys
  MOD_RES (4)..(4): Asn or Leu
  MOD_RES (5)..(5): Pro or His
  MOD_RES (6)..(6): Phe, Trp, Tyr or Val
  MOD_RES (9)..(9): Lys or Asp
  MOD_RES (42)..(42): Ala or Arg
  MOD_RES (44)..(44): Lys, Arg, or Glu
  MOD_RES (45)..(45): Lys, Ala, Arg, or Glu
  MOD_RES (54)..(54): Leu or Met
  MOD_RES (62)..(62): Pro, Asn, Asp, His, Glu, Gly, Ser or Thr
  MOD_RES (69)..(69): Gln or His
  MOD_RES (78)..(78): Arg or Lys
  MOD_RES (80)..(80): Asp or Pro
  MOD_RES (93)..(93): Ala, Glu or Lys
  MOD_RES (107)..(107): Gly or Asp
  MOD_RES (108)..(108): Gln or His
  MOD_RES (112)..(112): Gln, Arg, or Lys
  MOD_RES (125)..(125): Ala, Cys, Ile, Ser, Val, or Leu
  MOD_RES (126)..(126): Gln, Leu, Glu, Phe, His, Ile, Leu, or Tyr
  MOD_RES (150)..(150): Ala or Val
  MOD_RES (164)..(164): Cys or Gly
  MOD_RES (170)..(170): Arg or Pro
  MOD_RES (171)..(171): Ala or Gly
  MOD_RES (187)..(187): Arg, Ile, or Lys
  MOD_RES (188)..(188): Gln or Pro
  MOD_RES (189)..(189): Arg or Pro
  MOD_RES (196)..(196): Ala, Cys, Leu, or Val
  MOD_RES (213)..(213): Ala, Cys, Asn, Ser, or Thr
  MOD_RES (217)..(217): Leu, Ala, or Val
  MOD_RES (225)..(225): Glu or Pro
  MOD_RES (239)..(239): His or Pro
  MOD_RES (240)..(240): Leu, Asp, Asn, or Tyr
  MOD_RES (241)..(241): Arg, Ala, Asp, Leu, Gln, or Tyr
  MOD_RES (242)..(242): Ala, Cys, Phe, Gly, His, Ile, Lys, Leu, Met, Asn, Gln, Arg, Ser, Val, Trp, or Tyr
  MOD_RES (244)..(244): Val, Ile, or Lys
  MOD_RES (249)..(249): Thr or Ala
  MOD_RES (251)..(251): Asp or Gly
  MOD_RES (257)..(257): Glu, Lys, or Pro
  MOD_RES (258)..(258): Ser or Cys
  MOD_RES (260)..(260): Leu, Asp, Phe, Gln, or Thr
  MOD_RES (265)..(265): Val or Phe
  MOD_RES (270)..(270): Gln, Ala, His, Phe, Pro, Ser, or Thr
  MOD_RES (272)..(272): Cys or Val
  MOD_RES (292)..(292): Trp or Arg
  MOD_RES (301)..(301): Ser, Arg, Ala, Asp, Glu, Phe, Gly, His, Ile, Lys, Leu, Met, Asn, Pro, Gln, Thr, Val, Trp, or Tyr
  MOD_RES (302)..(302): Trp, Lys, Ala, Asp, Glu, Phe, Gly, His, Ile, Lys, Leu, Met, Asn, Pro, Gln, Arg, Ser, Thr, Val, or Tyr
  MOD_RES (325)..(325): Lys or Val
  MOD_RES (332)..(332): Ala, Cys, Ser, or Val
  MOD_RES (352)..(352): Cys, Leu, or Val
  MOD_RES (363)..(363): Val or Arg
  MOD_RES (365)..(365): Leu, Gln, His, Ile, Lys, or Ser
XXSXXXLQXESVFQSGAHAYRIPALLYLPGQQSLLAFAEQRXSXXDEHAELIVXRRGDYDAXTHQVQWXAQEVVAQAXLXGHRSMNPCPLYDXQTGTLFLFFIAIPXXVTEXQQLQTRANVTRLXXVTSTDHGRTWSSPRDLTDAAIGPXYREWSTFAVGPGHXLQLHDXXRSLVVPAYAYRKLHPXXXPIPSAFXFLSHDHGRTWARGHFVXQDTXECQVAEVXTGEQRVVTLNARSXXXXRXQAQSXNXGLDFQXXQXVKKLXEPPPXGXQGSVISFPSPRSGPGSPAQXLLYTHPTHXXQRADLGAYLNPRPPAPEAWSEPXLLAKGSXAYSDLQSMGTGPDGSPLFGXLYEANDYEEIXFXMFTLKQAFPAEYLPQ

SEQ ID NO: 200 - protein, 380 aa, Artificial Sequence
  Description of Artificial Sequence: Synthetic polypeptide
  MOD_RES (1)..(1): Ala, Arg, Asn, Asp, Gln, Glu, Gly, His, Leu, Lys, Met, Phe, Thr, Val, or not present
  MOD_RES (6)..(6): Phe, Trp, Tyr or Val
  MOD_RES (9)..(9): Lys or Asp
  MOD_RES (42)..(42): Arg or Ala
  MOD_RES (62)..(62): Pro, Asn, Asp, His, Glu, Gly, Ser or Thr
  MOD_RES (93)..(93): Ala, Glu, or Lys
  MOD_RES (126)..(126): Gln, Leu, Glu, Phe, His, Ile, Leu, or Tyr
  MOD_RES (187)..(187): Arg, Ile, or Lys
  MOD_RES (242)..(242): Ala, Cys, Phe, Gly, His, Ile, Lys, Leu, Met, Asn, Gln, Arg, Ser, Val, Trp, or Tyr
  MOD_RES (270)..(270): Gln, Ala, His, Phe, Pro, Ser, or Thr
  MOD_RES (301)..(301): Ser, Arg, Ala, Asp, Glu, Phe, Gly, His, Ile, Lys, Leu, Met, Asn, Pro, Gln, Thr, Val, Trp, or Tyr
  MOD_RES (302)..(302): Trp, Lys, Ala, Asp, Glu, Phe, Gly, His, Ile, Lys, Leu, Met, Asn, Pro, Gln, Arg, Ser, Thr, Val, or Tyr
  MOD_RES (332)..(332): Ala, Cys, Ser, or Val
  MOD_RES (363)..(363): Val or Arg
  MOD_RES (365)..(365): Leu, Gln, His, Ile, Lys, or Ser
XASLPXLQXESVFQSGAHAYRIPALLYLPGQQSLLAFAEQRXSKKDEHAELIVLRRGDYDAXTHQVQWQAQEVVAQARLDGHRSMNPCPLYDXQTGTLFLFFIAIPGQVTEQQQLQTRANVTRLCXVTSTDHGRTWSSPRDLTDAAIGPAYREWSTFAVGPGHCLQLHDRARSLVVPAYAYRKLHPXQRPIPSAFCFLSHDHGRTWARGHFVAQDTLECQVAEVETGEQRVVTLNARSHLRXRVQAQSTNDGLDFQESQLVKKLVEPPPXGCQGSVISFPSPRSGPGSPAQWLLYTHPTHXXQRADLGAYLNPRPPAPEAWSEPVLLAKGSXAYSDLQSMGTGPDGSPLFGCLYEANDYEEIXFXMFTLKQAFPAEYLPQ

SEQ ID NO: 201 - protein, 617 aa, Artificial Sequence
  Description of Artificial Sequence: Synthetic polypeptide
  MOD_RES (1)..(1): Ala, Arg, Asn, Asp, Gln, Glu, Gly, His, Leu, Lys, Met, Phe, Thr, Val, or not present
  MOD_RES (2)..(2): Ala or Lys
  MOD_RES (4)..(4): Asn or Leu
  MOD_RES (5)..(5): Pro or His
  MOD_RES (6)..(6): Phe, Trp, Tyr or Val
  MOD_RES (9)..(9): Lys or Asp
  MOD_RES (42)..(42): Ala or Arg
  MOD_RES (44)..(44): Lys, Arg, or Glu
  MOD_RES (45)..(45): Lys, Ala, Arg, or Glu
  MOD_RES (54)..(54): Leu or Met
  MOD_RES (62)..(62): Pro, Asn, Asp, His, Glu, Gly, Ser or Thr
  MOD_RES (69)..(69): Gln or His
  MOD_RES (78)..(78): Arg or Lys
  MOD_RES (80)..(80): Asp or Pro
  MOD_RES (93)..(93): Ala, Glu or Lys
  MOD_RES (107)..(107): Gly or Asp
  MOD_RES (108)..(108): Gln or His
  MOD_RES (112)..(112): Gln, Arg, or Lys
  MOD_RES (125)..(125): Ala, Cys, Ile, Ser, Val, or Leu
  MOD_RES (126)..(126): Gln, Leu, Glu, Phe, His, Ile, Leu, or Tyr
  MOD_RES (150)..(150): Ala or Val
  MOD_RES (164)..(164): Cys or Gly
  MOD_RES (170)..(170): Arg or Pro
  MOD_RES (171)..(171): Ala or Gly
  MOD_RES (187)..(187): Arg, Ile, or Lys
  MOD_RES (188)..(188): Gln or Pro
  MOD_RES (189)..(189): Arg or Pro
  MOD_RES (196)..(196): Ala, Cys, Leu, or Val
  MOD_RES (213)..(213): Ala, Cys, Asn, Ser, or Thr
  MOD_RES (217)..(217): Leu, Ala, or Val
  MOD_RES (225)..(225): Glu or Pro
  MOD_RES (239)..(239): His or Pro
  MOD_RES (240)..(240): Leu, Asp, Asn, or Tyr
  MOD_RES (241)..(241): Arg, Ala, Asp, Leu, Gln, or Tyr
  MOD_RES (242)..(242): Ala, Cys, Phe, Gly, His, Ile, Lys, Leu, Met, Asn, Gln, Arg, Ser, Val, Trp, or Tyr
  MOD_RES (244)..(244): Val, Ile, or Lys
  MOD_RES (249)..(249): Thr or Ala
  MOD_RES (251)..(251): Asp or Gly
  MOD_RES (257)..(257): Glu, Lys, or Pro
  MOD_RES (258)..(258): Ser or Cys
  MOD_RES (260)..(260): Leu, Asp, Phe, Gln, or Thr
  MOD_RES (265)..(265): Val or Phe
  MOD_RES (270)..(270): Gln, Ala, His, Phe, Pro, Ser, or Thr
  MOD_RES (272)..(272): Cys or Val
  MOD_RES (292)..(292): Trp or Arg
  MOD_RES (301)..(301): Ser, Arg, Ala, Asp, Glu, Phe, Gly, His, Ile, Lys, Leu, Met, Asn, Pro, Gln, Thr, Val, Trp, or Tyr
  MOD_RES (302)..(302): Trp, Lys, Ala, Asp, Glu, Phe, Gly, His, Ile, Lys, Leu, Met, Asn, Pro, Gln, Arg, Ser, Thr, Val, or Tyr
  MOD_RES (325)..(325): Lys or Val
  MOD_RES (332)..(332): Ala, Cys, Ser, or Val
  MOD_RES (352)..(352): Cys, Leu, or Val
  MOD_RES (363)..(363): Val or Arg
  MOD_RES (365)..(365): Leu, Gln, His, Ile, Lys, or Ser
  MOD_RES (381)..(390): This region may encompass one of the following sequences: "GGGGS" or "GGGGSGGGGS" or "EPKSS"
XXSXXXLQXESVFQSGAHAYRIPALLYLPGQQSLLAFAEQRXSXXDEHAELIVXRRGDYDAXTHQVQWXAQEVVAQAXLXGHRSMNPCPLYDXQTGTLFLFFIAIPXXVTEXQQLQTRANVTRLXXVTSTDHGRTWSSPRDLTDAAIGPXYREWSTFAVGPGHXLQLHDXXRSLVVPAYAYRKLHPXXXPIPSAFXFLSHDHGRTWARGHFVXQDTXECQVAEVXTGEQRVVTLNARSXXXXRXQAQSXNXGLDFQXXQXVKKLXEPPPXGXQGSVISFPSPRSGPGSPAQXLLYTHPTHXXQRADLGAYLNPRPPAPEAWSEPXLLAKGSXAYSDLQSMGTGPDGSPLFGXLYEANDYEEIXFXMFTLKQAFPAEYLPQXXXXXXXXXXDKTHTCPPCPAPELLGGPSVFLFPPKPKDTLMISRTPEVTCVVVDVSHEDPEVKFNWYVDGVEVHNAKTKPREEQYNSTYRVVSVLTVLHQDWLNGKEYKCKVSNKALPAPIEKTISKAKGQPREPQVYTLPPSREEMTKNQVSLTCLVKGFYPSDIAVEWESNGQPENNYKTTPPVLDSDGSFFLTSKLTVDKSRWQQGNVFSCSVMHEALHNHYTQKSLSLSPGK

SEQ ID NO: 202 - protein, 617 aa, Artificial Sequence
  Description of Artificial Sequence: Synthetic polypeptide
  MOD_RES (1)..(1): Ala, Arg, Asn, Asp, Gln, Glu, Gly, His, Leu, Lys, Met, Phe, Thr, Val, or not present
  MOD_RES (6)..(6): Phe, Trp, Tyr or Val
  MOD_RES (9)..(9): Lys or Asp
  MOD_RES (42)..(42): Arg or Ala
  MOD_RES (62)..(62): Pro, Asn, Asp, His, Glu, Gly, Ser or Thr
  MOD_RES (93)..(93): Ala, Glu, or Lys
  MOD_RES (126)..(126): Gln, Leu, Glu, Phe, His, Ile, Leu, or Tyr
  MOD_RES (187)..(187): Arg, Ile, or Lys
  MOD_RES (242)..(242): Ala, Cys, Phe, Gly, His, Ile, Lys, Leu, Met, Asn, Gln, Arg, Ser, Val, Trp, or Tyr
  MOD_RES (270)..(270): Gln, Ala, His, Phe, Pro, Ser, or Thr
  MOD_RES (301)..(301): Ser, Arg, Ala, Asp, Glu, Phe, Gly, His, Ile, Lys, Leu, Met, Asn, Pro, Gln, Thr, Val, Trp, or Tyr
  MOD_RES (302)..(302): Trp, Lys, Ala, Asp, Glu, Phe, Gly, His, Ile, Lys, Leu, Met, Asn, Pro, Gln, Arg, Ser, Thr, Val, or Tyr
  MOD_RES (332)..(332): Ala, Cys, Ser, or Val
  MOD_RES (363)..(363): Val or Arg
  MOD_RES (365)..(365): Leu, Gln, His, Ile, Lys, or Ser
  MOD_RES (381)..(390): This region may encompass one of the following sequences: "GGGGS" or "GGGGSGGGGS" or "EPKSS" ,
XASLPXLQXESVFQSGAHAYRIPALLYLPGQQSLLAFAEQRXSKKDEHAELIVLRRGDYDAXTHQVQWQAQEVVAQARLDGHRSMNPCPLYDXQTGTLFLFFIAIPGQVTEQQQLQTRANVTRLCXVTSTDHGRTWSSPRDLTDAAIGPAYREWSTFAVGPGHCLQLHDRARSLVVPAYAYRKLHPXQRPIPSAFCFLSHDHGRTWARGHFVAQDTLECQVAEVETGEQRVVTLNARSHLRXRVQAQSTNDGLDFQESQLVKKLVEPPPXGCQGSVISFPSPRSGPGSPAQWLLYTHPTHXXQRADLGAYLNPRPPAPEAWSEPVLLAKGSXAYSDLQSMGTGPDGSPLFGCLYEANDYEEIXFXMFTLKQAFPAEYLPQXXXXXXXXXXDKTHTCPPCPAPELLGGPSVFLFPPKPKDTLMISRTPEVTCVVVDVSHEDPEVKFNWYVDGVEVHNAKTKPREEQYNSTYRVVSVLTVLHQDWLNGKEYKCKVSNKALPAPIEKTISKAKGQPREPQVYTLPPSREEMTKNQVSLTCLVKGFYPSDIAVEWESNGQPENNYKTTPPVLDSDGSFFLTSKLTVDKSRWQQGNVFSCSVMHEALHNHYTQKSLSLSPGK

SEQ ID NO: 203 - protein, 612 aa, Artificial Sequence
  Description of Artificial Sequence: Synthetic polypeptide
DASLPYLQKESVFQSGAHAYRIPALLYLPGQQSLLAFAEQRRSKKDEHAELIVLRRGDYDAGTHQVQWQAQEVVAQARLDGHRSMNPCPLYDEQTGTLFLFFIAIPGQVTEQQQLQTRANVTRLCYVTSTDHGRTWSSPRDLTDAAIGPAYREWSTFAVGPGHCLQLHDRARSLVVPAYAYRKLHPKQRPIPSAFCFLSHDHGRTWARGHFVAQDTLECQVAEVETGEQRVVTLNARSHLRFRVQAQSTNDGLDFQESQLVKKLVEPPPTGCQGSVISFPSPRSGPGSPAQWLLYTHPTHSWQRADLGAYLNPRPPAPEAWSEPVLLAKGSAAYSDLQSMGTGPDGSPLFGCLYEANDYEEIVFLMFTLKQAFPAEYLPQEPKSSDKTHTCPPCPAPELLGGPSVFLFPPKPKDTLMISRTPEVTCVVVDVSHEDPEVKFNWYVDGVEVHNAKTKPREEQYASTYRVVSVLTVLHQDWLNGKEYKCKVSNKALPAPIEKTISKAKGQPREPQVYTLPPSREEMTKNQVSLYCLVKGFYPSDIAVEWESNGQPENNYKTTPPVLDSDGSFFLYSKLTVDKSRWQQGNVFSCSVMHEALHNHYTQKSLSLSPGK

SEQ ID NO: 204 - protein, 617 aa, Artificial Sequence
  Description of Artificial Sequence: Synthetic polypeptide
DASLPYLQKESVFQSGAHAYRIPALLYLPGQQSLLAFAEQRRSKKDEHAELIVLRRGDYDAGTHQVQWQAQEVVAQARLDGHRSMNPCPLYDEQTGTLFLFFIAIPGQVTEQQQLQTRANVTRLCYVTSTDHGRTWSSPRDLTDAAIGPAYREWSTFAVGPGHCLQLHDRARSLVVPAYAYRKLHPKQRPIPSAFCFLSHDHGRTWARGHFVAQDTLECQVAEVETGEQRVVTLNARSHLRFRVQAQSTNDGLDFQESQLVKKLVEPPPTGCQGSVISFPSPRSGPGSPAQWLLYTHPTHSWQRADLGAYLNPRPPAPEAWSEPVLLAKGSAAYSDLQSMGTGPDGSPLFGCLYEANDYEEIVFLMFTLKQAFPAEYLPQGGGGSGGGGSDKTHTCPPCPAPELLGGPSVFLFPPKPKDTLMISRTPEVTCVVVDVSHEDPEVKFNWYVDGVEVHNAKTKPREEQYASTYRVVSVLTVLHQDWLNGKEYKCKVSNKALPAPIEKTISKAKGQPREPQVYTLPPSREEMTKNQVSLYCLVKGFYPSDIAVEWESNGQPENNYKTTPPVLDSDGSFFLYSKLTVDKSRWQQGNVFSCSVMHEALHNHYTQKSLSLSPGK

SEQ ID NO: 205 - protein, 612 aa, Artificial Sequence
  Description of Artificial Sequence: Synthetic polypeptide
DASLPYLQKESVFQSGAHAYRIPALLYLPGQQSLLAFAEQRRSKKDEHAELIVLRRGDYDAGTHQVQWQAQEVVAQARLDGHRSMNPCPLYDEQTGTLFLFFIAIPGQVTEQQQLQTRANVTRLCYVTSTDHGRTWSSPRDLTDAAIGPAYREWSTFAVGPGHCLQLHDRARSLVVPAYAYRKLHPKQRPIPSAFCFLSHDHGRTWARGHFVAQDTLECQVAEVETGEQRVVTLNARSHLRFRVQAQSTNDGLDFQESQLVKKLVEPPPTGCQGSVISFPSPRSGPGSPAQWLLYTHPTHSWQRADLGAYLNPRPPAPEAWSEPVLLAKGSAAYSDLQSMGTGPDGSPLFGCLYEANDYEEIVFLMFTLKQAFPAEYLPQEPKSSDKTHTCPPCPAPELLGGPSVFLFPPKPKDTLMISRTPEVTCVVVDVSHEDPEVKFNWYVDGVEVHNAKTKPREEQYNSTYRVVSVLTVLHQDWLNGKEYKCKVSNKALPAPIEKTISKAKGQPREPQVYTLPPSREEMTKNQVSLYCLVKGFYPSDIAVEWESNGQPENNYKTTPPVLDSDGSFFLYSKLTVDKSRWQQGNVFSCSVMHEALHNHYTQKSLSLSPGK

SEQ ID NO: 206 - protein, 617 aa, Artificial Sequence
  Description of Artificial Sequence: Synthetic polypeptide
DASLPYLQKESVFQSGAHAYRIPALLYLPGQQSLLAFAEQRRSKKDEHAELIVLRRGDYDAGTHQVQWQAQEVVAQARLDGHRSMNPCPLYDEQTGTLFLFFIAIPGQVTEQQQLQTRANVTRLCYVTSTDHGRTWSSPRDLTDAAIGPAYREWSTFAVGPGHCLQLHDRARSLVVPAYAYRKLHPKQRPIPSAFCFLSHDHGRTWARGHFVAQDTLECQVAEVETGEQRVVTLNARSHLRFRVQAQSTNDGLDFQESQLVKKLVEPPPTGCQGSVISFPSPRSGPGSPAQWLLYTHPTHSWQRADLGAYLNPRPPAPEAWSEPVLLAKGSAAYSDLQSMGTGPDGSPLFGCLYEANDYEEIVFLMFTLKQAFPAEYLPQGGGGSGGGGSDKTHTCPPCPAPELLGGPSVFLFPPKPKDTLMISRTPEVTCVVVDVSHEDPEVKFNWYVDGVEVHNAKTKPREEQYNSTYRVVSVLTVLHQDWLNGKEYKCKVSNKALPAPIEKTISKAKGQPREPQVYTLPPSREEMTKNQVSLYCLVKGFYPSDIAVEWESNGQPENNYKTTPPVLDSDGSFFLYSKLTVDKSRWQQGNVFSCSVMHEALHNHYTQKSLSLSPGK

SEQ ID NO: 207 - protein, 617 aa, Artificial Sequence
  Description of Artificial Sequence: Synthetic polypeptide
DASLPYLQKESVFQSGAHAYRIPALLYLPGQQSLLAFAEQRRSKKDEHAELIVLRRGDYDAGTHQVQWQAQEVVAQARLDGHRSMNPCPLYDEQTGTLFLFFIAIPGQVTEQQQLQTRANVTRLCYVTSTDHGRTWSSPRDLTDAAIGPAYREWSTFAVGPGHCLQLHDRARSLVVPAYAYRKLHPKQRPIPSAFCFLSHDHGRTWARGHFVAQDTLECQVAEVETGEQRVVTLNARSHLRFRVQAQSTNDGLDFQESQLVKKLVEPPPTGCQGSVISFPSPRSGPGSPAQWLLYTHPTHSWQRADLGAYLNPRPPAPEAWSEPVLLAKGSAAYSDLQSMGTGPDGSPLFGCLYEANDYEEIVFLMFTLKQAFPAEYLPQGGGGSGGGGSDKTHTCPPCPAPELLGGPSVFLFPPKPKDTLMISRTPEVTCVVVDVSHEDPEVKFNWYVDGVEVHNAKTKPREEQYNSTYRVVSVLTVLHQDWLNGKEYKCKVSNKALPAPIEKTISKAKGQPREPQVYTLPPSREEMTKNQVSLTCLVKGFYPSDIAVEWESNGQPENNYKTTPPVLDSDGSFFLTSKLTVDKSRWQQGNVFSCSVMHEALHNHYTQKSLSLSPGK

SEQ ID NO: 208 - protein, 612 aa, Artificial Sequence
  Description of Artificial Sequence: Synthetic polypeptide
DASLPYLQKESVFQSGAHAYRIPALLYLPGQQSLLAFAEQRRSKKDEHAELIVLRRGDYDAGTHQVQWQAQEVVAQARLDGHRSMNPCPLYDEQTGTLFLFFIAIPGQVTEQQQLQTRANVTRLCYVTSTDHGRTWSSPRDLTDAAIGPAYREWSTFAVGPGHCLQLHDRARSLVVPAYAYRKLHPKQRPIPSAFCFLSHDHGRTWARGHFVAQDTLECQVAEVETGEQRVVTLNARSHLRFRVQAQSTNDGLDFQESQLVKKLVEPPPTGCQGSVISFPSPRSGPGSPAQWLLYTHPTHSWQRADLGAYLNPRPPAPEAWSEPVLLAKGSAAYSDLQSMGTGPDGSPLFGCLYEANDYEEIVFLMFTLKQAFPAEYLPQEPKSSDKTHTCPPCPAPELLGGPSVFLFPPKPKDTLMISRTPEVTCVVVDVSHEDPEVKFNWYVDGVEVHNAKTKPREEQYNSTYRVVSVLTVLHQDWLNGKEYKCKVSNKALPAPIEKTISKAKGQPREPQVYTLPPSREEMTKNQVSLTCLVKGFYPSDIAVEWESNGQPENNYKTTPPVLDSDGSFFLTSKLTVDKSRWQQGNVFSCSVMHEALHNHYTQKSLSLSPGK

SEQ ID NO: 209 - protein, 617 aa, Artificial Sequence
  Description of Artificial Sequence: Synthetic polypeptide
DASLPYLQKESVFQSGAHAYRIPALLYLPGQQSLLAFAEQRRSKKDEHAELIVLRRGDYDAGTHQVQWQAQEVVAQARLDGHRSMNPCPLYDEQTGTLFLFFIAIPGQVTEQQQLQTRANVTRLCYVTSTDHGRTWSSPRDLTDAAIGPAYREWSTFAVGPGHCLQLHDRARSLVVPAYAYRKLHPKQRPIPSAFCFLSHDHGRTWARGHFVAQDTLECQVAEVETGEQRVVTLNARSHLRFRVQAQSTNDGLDFQESQLVKKLVEPPPTGCQGSVISFPSPRSGPGSPAQWLLYTHPTHSWQRADLGAYLNPRPPAPEAWSEPVLLAKGSAAYSDLQSMGTGPDGSPLFGCLYEANDYEEIVFLMFTLKQAFPAEYLPQGGGGSGGGGSDKTHTCPPCPAPELLGGPSVFLFPPKPKDTLMISRTPEVTCVVVDVSHEDPEVKFNWYVDGVEVHNAKTKPREEQYNSTYRVVSVLTVLHQDWLNGKEYKCKVSNKALPAPIEKTISKAKGQPREPQVYTLPPSREEMTKNQVSLTCLVKGFYPSDIAVEWESNGQPENNYKTTPPVLDSDGSFFLYSKLTVDKSRWQQGNVFSCSVMHEALHNHYTQKSLSLSPGK

SEQ ID NO: 210 - protein, 612 aa, Artificial Sequence
  Description of Artificial Sequence: Synthetic polypeptide
DASLPYLQKESVFQSGAHAYRIPALLYLPGQQSLLAFAEQRRSKKDEHAELIVLRRGDYDAGTHQVQWQAQEVVAQARLDGHRSMNPCPLYDEQTGTLFLFFIAIPGQVTEQQQLQTRANVTRLCYVTSTDHGRTWSSPRDLTDAAIGPAYREWSTFAVGPGHCLQLHDRARSLVVPAYAYRKLHPKQRPIPSAFCFLSHDHGRTWARGHFVAQDTLECQVAEVETGEQRVVTLNARSHLRFRVQAQSTNDGLDFQESQLVKKLVEPPPTGCQGSVISFPSPRSGPGSPAQWLLYTHPTHSWQRADLGAYLNPRPPAPEAWSEPVLLAKGSAAYSDLQSMGTGPDGSPLFGCLYEANDYEEIVFLMFTLKQAFPAEYLPQEPKSSDKTHTCPPCPAPELLGGPSVFLFPPKPKDTLMISRTPEVTCVVVDVSHEDPEVKFNWYVDGVEVHNAKTKPREEQYNSTYRVVSVLTVLHQDWLNGKEYKCKVSNKALPAPIEKTISKAKGQPREPQVYTLPPSREEMTKNQVSLTCLVKGFYPSDIAVEWESNGQPENNYKTTPPVLDSDGSFFLYSKLTVDKSRWQQGNVFSCSVMHEALHNHYTQKSLSLSPGK

SEQ ID NO: 211 - protein, 330 aa, Artificial Sequence
  Description of Artificial Sequence: Synthetic polypeptide
ASTKGPSVFPLAPSSKSTSGGTAALGCLVKDYFPEPVTVSWNSGALTSGVHTFPAVLQSSGLYSLSSVVTVPSSSLGTQTYICNVNHKPSNTKVDKKVEPKSCDKTHTCPPCPAPELLGGPSVFLFPPKPKDTLMISRTPEVTCVVVDVSHEDPEVKFNWYVDGVEVHNAKTKPREEQYNSTYRVVSVLTVLHQDWLNGKEYKCKVSNKALPAPIEKTISKAKGQPREPQVYTLPPSREEMTKNQVSLTCLVKGFYPSDIAVEWESNGQPENNYKTTPPVLDSDGSFFLYSKLTVDKSRWQQGNVFSCSVMHEALHNHYTQKSLSLSPGK

SEQ ID NO: 212 - protein, 330 aa, Artificial Sequence
  Description of Artificial Sequence: Synthetic polypeptide
ASTKGPSVFPLAPSSKSTSGGTAALGCLVKDYFPEPVTVSWNSGALTSGVHTFPAVLQSSGLYSLSSVVTVPSSSLGTQTYICNVNHKPSNTKVDKKVEPKSCDKTHTCPPCPAPELLGGPSVFLFPPKPKDTLMISRTPEVTCVVVDVSHEDPEVKFNWYVDGVEVHNAKTKPREEQYASTYRVVSVLTVLHQDWLNGKEYKCKVSNKALPAPIEKTISKAKGQPREPQVYTLPPSREEMTKNQVSLTCLVKGFYPSDIAVEWESNGQPENNYKTTPPVLDSDGSFFLYSKLTVDKSRWQQGNVFSCSVMHEALHNHYTQKSLSLSPGK

SEQ ID NO: 213 - protein, 330 aa, Artificial Sequence
  Description of Artificial Sequence: Synthetic polypeptide
ASTKGPSVFPLAPSSKSTSGGTAALGCLVKDYFPEPVTVSWNSGALTSGVHTFPAVLQSSGLYSLSSVVTVPSSSLGTQTYICNVNHKPSNTKVDKKVEPKSCDKTHTCPPCPAPELLGGPSVFLFPPKPKDTLMISRTPEVTCVVVDVSHEDPEVKFNWYVDGVEVHNAKTKPREEQYNSTYRVVSVLTVLHQDWLNGKEYKCKVSNKALPAPIEKTISKAKGQPREPQVYTLPPSREEMTKNQVSLTCLVKGFYPSDIAVEWESNGQPENNYKTTPPVLDSDGSFFLTSKLTVDKSRWQQGNVFSCSVMHEALHNHYTQKSLSLSPGK

SEQ ID NO: 214 - protein, 330 aa, Artificial Sequence
  Description of Artificial Sequence: Synthetic polypeptide
ASTKGPSVFPLAPSSKSTSGGTAALGCLVKDYFPEPVTVSWNSGALTSGVHTFPAVLQSSGLYSLSSVVTVPSSSLGTQTYICNVNHKPSNTKVDKKVEPKSCDKTHTCPPCPAPELLGGPSVFLFPPKPKDTLMISRTPEVTCVVVDVSHEDPEVKFNWYVDGVEVHNAKTKPREEQYNSTYRVVSVLTVLHQDWLNGKEYKCKVSNKALPAPIEKTISKAKGQPREPQVYTLPPSREEMTKNQVSLYCLVKGFYPSDIAVEWESNGQPENNYKTTPPVLDSDGSFFLYSKLTVDKSRWQQGNVFSCSVMHEALHNHYTQKSLSLSPGK

SEQ ID NO: 215 - protein, 330 aa, Artificial Sequence
  Description of Artificial Sequence: Synthetic polypeptide
ASTKGPSVFPLAPSSKSTSGGTAALGCLVKDYFPEPVTVSWNSGALTSGVHTFPAVLQSSGLYSLSSVVTVPSSSLGTQTYICNVNHKPSNTKVDKKVEPKSCDKTHTCPPCPAPELLGGPSVFLFPPKPKDTLMISRTPEVTCVVVDVSHEDPEVKFNWYVDGVEVHNAKTKPREEQYASTYRVVSVLTVLHQDWLNGKEYKCKVSNKALPAPIEKTISKAKGQPREPQVYTLPPSREEMTKNQVSLTCLVKGFYPSDIAVEWESNGQPENNYKTTPPVLDSDGSFFLTSKLTVDKSRWQQGNVFSCSVMHEALHNHYTQKSLSLSPGK

SEQ ID NO: 216 - protein, 330 aa, Artificial Sequence
  Description of Artificial Sequence: Synthetic polypeptide
ASTKGPSVFPLAPSSKSTSGGTAALGCLVKDYFPEPVTVSWNSGALTSGVHTFPAVLQSSGLYSLSSVVTVPSSSLGTQTYICNVNHKPSNTKVDKKVEPKSCDKTHTCPPCPAPELLGGPSVFLFPPKPKDTLMISRTPEVTCVVVDVSHEDPEVKFNWYVDGVEVHNAKTKPREEQYASTYRVVSVLTVLHQDWLNGKEYKCKVSNKALPAPIEKTISKAKGQPREPQVYTLPPSREEMTKNQVSLYCLVKGFYPSDIAVEWESNGQPENNYKTTPPVLDSDGSFFLYSKLTVDKSRWQQGNVFSCSVMHEALHNHYTQKSLSLSPGK

SEQ ID NO: 217 - DNA, 1836 bp, Artificial Sequence
  Description of Artificial Sequence: Synthetic polynucleotide
gatgcatctctgccttacctgcagaaagaaagcgtgttccagtctggcgcccacgcctacagaattcccgctctgctgtatctgccaggccagcagtctctgctggctttcgctgaacagcggcggagcaagaaggatgagcacgccgaactgatcgtgctgcggagaggcgattacgacgccggcacacatcaggtgcagtggcaggctcaagaggtggtggctcaggctagactggacggccacagatctatgaacccctgtcctctgtacgatgaacagaccggcacactgtttctgttctttatcgctatccccggccaagtgaccgagcagcagcagctgcagacaagagccaacgtgaccagactgtgttacgtgacctccaccgaccacggcagaacctggtctagccctagagatctgaccgacgccgccatcggacctgcctatagagagtggtccaccttcgccgttggacctggacactgtctccagctgcacgacagggctagatctctggtggtgcctgcctacgcctatagaaagctgcaccccaaacagcggcctattcctagcgccttctgctttctgagccacgatcacggcaggacatgggccagaggacatttcgtggcccaggacacactggaatgccaggtggccgaagtggaaaccggcgagcagagagtcgtgaccctgaacgccagatctcacctgagattcagagtgcaggcccagagcacaaacgacggcctggatttccaagagagccagctggtcaagaaactggtggaacctcctccaaccggctgtcagggaagcgtgatcagctttccatctcctagaagcggccctggctctcctgctcagtggctgctgtatacacaccccacacacagctggcagagagccgatctgggcgcctacctgaatcctagacctcctgctcctgaggcttggagcgaacctgttctgctggccaagggcagcgctgcctacagcgatctgcagtctatgggcacaggccctgatggcagccctctgtttggctgtctgtacgaggccaacgactacgaagagatcgtgttcctgatgttcaccctgaagcaggcctttccagccgagtacctgcctcaagagcccaaatcttctgacaaaactcacacatgcccaccgtgcccagcacctgaactcctggggggaccgtcagtcttcctcttccccccaaaacccaaggacaccctcatgatctcccggacccctgaggtcacatgcgtggtggtggacgtgagccacgaagaccctgaggtcaagttcaactggtacgtggacggcgtggaggtgcataatgccaagacaaagccgcgggaggagcagtacaacagcacgtaccgtgtggtcagcgtcctcaccgtcctgcaccaggactggctgaatggcaaggagtacaagtgcaaggtctccaacaaagccctcccagcccccatcgagaaaaccatctccaaagccaaagggcagccccgagaaccacaggtctacaccctgcccccatcccgggaggagatgaccaagaaccaggtcagcctgacctgcctggtcaaaggcttctatcccagcgacatcgccgtggagtgggagagcaatgggcagccggagaacaactacaagaccacgcctcccgtgctggactccgacggctccttcttcctctatagcaagctcaccgtggacaagagcaggtggcagcaggggaacgtcttctcatgctccgtgatgcatgaggctctgcacaaccactacacgcagaagagcctctccctgtctccgggtaaa

SEQ ID NO: 218 - protein, 612 aa, Artificial Sequence
  Description of Artificial Sequence: Synthetic polypeptide
DASLPYLQKESVFQSGAHAYRIPALLYLPGQQSLLAFAEQRRSKKDEHAELIVLRRGDYDAGTHQVQWQAQEVVAQARLDGHRSMNPCPLYDEQTGTLFLFFIAIPGQVTEQQQLQTRANVTRLCYVTSTDHGRTWSSPRDLTDAAIGPAYREWSTFAVGPGHCLQLHDRARSLVVPAYAYRKLHPKQRPIPSAFCFLSHDHGRTWARGHFVAQDTLECQVAEVETGEQRVVTLNARSHLRFRVQAQSTNDGLDFQESQLVKKLVEPPPTGCQGSVISFPSPRSGPGSPAQWLLYTHPTHSWQRADLGAYLNPRPPAPEAWSEPVLLAKGSAAYSDLQSMGTGPDGSPLFGCLYEANDYEEIVFLMFTLKQAFPAEYLPQEPKSSDKTHTCPPCPAPELLGGPSVFLFPPKPKDTLMISRTPEVTCVVVDVSHEDPEVKFNWYVDGVEVHNAKTKPREEQYASTYRVVSVLTVLHQDWLNGKEYKCKVSNKALPAPIEKTISKAKGQPREPQVYTLPPSREEMTKNQVSLTCLVKGFYPSDIAVEWESNGQPENNYKTTPPVLDSDGSFFLYSKLTVDKSRWQQGNVFSCSVMHEALHNHYTQKSLSLSPGK

SEQ ID NO: 219 - DNA, 1836 bp, Artificial Sequence
  Description of Artificial Sequence: Synthetic polynucleotide
gatgcatctctgccttacctgcagaaagaaagcgtgttccagtctggcgcccacgcctacagaattcccgctctgctgtatctgccaggccagcagtctctgctggctttcgctgaacagcggcggagcaagaaggatgagcacgccgaactgatcgtgctgcggagaggcgattacgacgccggcacacatcaggtgcagtggcaggctcaagaggtggtggctcaggctagactggacggccacagatctatgaacccctgtcctctgtacgatgaacagaccggcacactgtttctgttctttatcgctatccccggccaagtgaccgagcagcagcagctgcagacaagagccaacgtgaccagactgtgttacgtgacctccaccgaccacggcagaacctggtctagccctagagatctgaccgacgccgccatcggacctgcctatagagagtggtccaccttcgccgttggacctggacactgtctccagctgcacgacagggctagatctctggtggtgcctgcctacgcctatagaaagctgcaccccaaacagcggcctattcctagcgccttctgctttctgagccacgatcacggcaggacatgggccagaggacatttcgtggcccaggacacactggaatgccaggtggccgaagtggaaaccggcgagcagagagtcgtgaccctgaacgccagatctcacctgagattcagagtgcaggcccagagcacaaacgacggcctggatttccaagagagccagctggtcaagaaactggtggaacctcctccaaccggctgtcagggaagcgtgatcagctttccatctcctagaagcggccctggctctcctgctcagtggctgctgtatacacaccccacacacagctggcagagagccgatctgggcgcctacctgaatcctagacctcctgctcctgaggcttggagcgaacctgttctgctggccaagggcagcgctgcctacagcgatctgcagtctatgggcacaggccctgatggcagccctctgtttggctgtctgtacgaggccaacgactacgaagagatcgtgttcctgatgttcaccctgaagcaggcctttccagccgagtacctgcctcaagagcccaaatcttctgacaaaactcacacatgcccaccgtgcccagcacctgaactcctggggggaccgtcagtcttcctcttccccccaaaacccaaggacaccctcatgatctcccggacccctgaggtcacatgcgtggtggtggacgtgagccacgaagaccctgaggtcaagttcaactggtacgtggacggcgtggaggtgcataatgccaagacaaagccgcgggaggagcagtacgccagcacgtaccgtgtggtcagcgtcctcaccgtcctgcaccaggactggctgaatggcaaggagtacaagtgcaaggtctccaacaaagccctcccagcccccatcgagaaaaccatctccaaagccaaagggcagccccgagaaccacaggtctacaccctgcccccatcccgggaggagatgaccaagaaccaggtcagcctgacctgcctggtcaaaggcttctatcccagcgacatcgccgtggagtgggagagcaatgggcagccggagaacaactacaagaccacgcctcccgtgctggactccgacggctccttcttcctctatagcaagctcaccgtggacaagagcaggtggcagcaggggaacgtcttctcatgctccgtgatgcatgaggctctgcacaaccactacacgcagaagagcctaagcttgtctccgggtaaa

SEQ ID NO: 220 - protein, 612 aa, Artificial Sequence
  Description of Artificial Sequence: Synthetic polypeptide
DASLPYLQKESVFQSGAHAYRIPALLYLPGQQSLLAFAEQRRSKKDEHAELIVLRRGDYDAGTHQVQWQAQEVVAQARLDGHRSMNPCPLYDEQTGTLFLFFIAIPGQVTEEQQLQTRANVTRLCYVTSTDHGRTWSSPRDLTDAAIGPAYREWSTFAVGPGHCLQLHDRARSLVVPAYAYRKLHPKQRPIPSAFCFLSHDHGRTWARGHFVAQDTLECQVAEVETGEQRVVTLNARSHLRFRVQAQSTNDGLDFQESQLVKKLVEPPPTGCQGSVISFPSPRSGPGSPAQWLLYTHPTHSWQRADLGAYLNPRPPAPEAWSEPVLLAKGSAAYSDLQSMGTGPDGSPLFGCLYEANDYEEIVFLMFTLKQAFPAEYLPQEPKSSDKTHTCPPCPAPELLGGPSVFLFPPKPKDTLMISRTPEVTCVVVDVSHEDPEVKFNWYVDGVEVHNAKTKPREEQYNSTYRVVSVLTVLHQDWLNGKEYKCKVSNKALPAPIEKTISKAKGQPREPQVYTLPPSREEMTKNQVSLTCLVKGFYPSDIAVEWESNGQPENNYKTTPPVLDSDGSFFLYSKLTVDKSRWQQGNVFSCSVMHEALHNHYTQKSLSLSPGK

SEQ ID NO: 221 - DNA, 1836 bp, Artificial Sequence
  Description of Artificial Sequence: Synthetic polynucleotide
gatgcatctctgccttacctgcagaaagaaagcgtgttccagtctggcgcccacgcctacagaattcccgctctgctgtatctgccaggccagcagtctctgctggctttcgctgaacagcggcggagcaagaaggatgagcacgccgaactgatcgtgctgcggagaggcgattacgacgccggcacacatcaggtgcagtggcaggctcaagaggtggtggctcaggctagactggacggccacagatctatgaacccctgtcctctgtacgatgaacagaccggcacactgtttctgttctttatcgctatccccggccaagtgaccgaggaacagcagctgcagacaagagccaacgtgaccagactgtgttacgtgacctccaccgaccacggcagaacctggtctagccctagagatctgaccgacgccgccatcggacctgcctatagagagtggtccaccttcgccgttggacctggacactgtctccagctgcacgacagggctagatctctggtggtgcctgcctacgcctatagaaagctgcaccccaaacagcggcctattcctagcgccttctgctttctgagccacgatcacggcaggacatgggccagaggacatttcgtggcccaggacacactggaatgccaggtggccgaagtggaaaccggcgagcagagagtcgtgaccctgaacgccagatctcacctgagattcagagtgcaggcccagagcacaaacgacggcctggatttccaagagagccagctggtcaagaaactggtggaacctcctccaaccggctgtcagggaagcgtgatcagctttccatctcctagaagcggccctggctctcctgctcagtggctgctgtatacacaccccacacacagctggcagagagccgatctgggcgcctacctgaatcctagacctcctgctcctgaggcttggagcgaacctgttctgctggccaagggcagcgctgcctacagcgatctgcagtctatgggcacaggccctgatggcagccctctgtttggctgtctgtacgaggccaacgactacgaagagatcgtgttcctgatgttcaccctgaagcaggcctttccagccgagtacctgcctcaagagcccaaatcttctgacaaaactcacacatgcccaccgtgcccagcacctgaactcctggggggaccgtcagtcttcctcttccccccaaaacccaaggacaccctcatgatctcccggacccctgaggtcacatgcgtggtggtggacgtgagccacgaagaccctgaggtcaagttcaactggtacgtggacggcgtggaggtgcataatgccaagacaaagccgcgggaggagcagtacaacagcacgtaccgtgtggtcagcgtcctcaccgtcctgcaccaggactggctgaatggcaaggagtacaagtgcaaggtctccaacaaagccctcccagcccccatcgagaaaaccatctccaaagccaaagggcagccccgagaaccacaggtctacaccctgcccccatcccgggaggagatgaccaagaaccaggtcagcctgacctgcctggtcaaaggcttctatcccagcgacatcgccgtggagtgggagagcaatgggcagccggagaacaactacaagaccacgcctcccgtgctggactccgacggctccttcttcctctatagcaagctcaccgtggacaagagcaggtggcagcaggggaacgtcttctcatgctccgtgatgcatgaggctctgcacaaccactacacgcagaagagcctctccctgtctccgggtaaa

SEQ ID NO: 222 - protein, 612 aa, Artificial Sequence
  Description of Artificial Sequence: Synthetic polypeptide
DASLPYLQKESVFQSGAHAYRIPALLYLPGQQSLLAFAEQRRSKKDEHAELIVLRRGDYDAGTHQVQWQAQEVVAQARLDGHRSMNPCPLYDEQTGTLFLFFIAIPGQVTEQQQLQTRANVTRLCYVTSTDHGRTWSSPRDLTDAAIGPAYREWSTFAVGPGHCLQLHDRARSLVVPAYAYRKLHPKQRPIPSAFCFLSHDHGRTWARGHFVAQDTLECQVAEVCTGEQRVVTLNARSHLRFRVQAQSTNDGLDFQESQLVKKLVEPPPTGCQGSVISFPSPRSGPGSPCQWLLYTHPTHSWQRADLGAYLNPRPPAPEAWSEPVLLAKGSAAYSDLQSMGTGPDGSPLFGCLYEANDYEEIVFLMFTLKQAFPAEYLPQEPKSSDKTHTCPPCPAPELLGGPSVFLFPPKPKDTLMISRTPEVTCVVVDVSHEDPEVKFNWYVDGVEVHNAKTKPREEQYNSTYRVVSVLTVLHQDWLNGKEYKCKVSNKALPAPIEKTISKAKGQPREPQVYTLPPSREEMTKNQVSLTCLVKGFYPSDIAVEWESNGQPENNYKTTPPVLDSDGSFFLYSKLTVDKSRWQQGNVFSCSVMHEALHNHYTQKSLSLSPGK

SEQ ID NO: 223 - DNA, 1836 bp, Artificial Sequence
  Description of Artificial Sequence: Synthetic polynucleotide
gatgcatctctgccttacctgcagaaagaaagcgtgttccagtctggcgcccacgcctacagaattcccgctctgctgtatctgccaggccagcagtctctgctggctttcgctgaacagcggcggagcaagaaggatgagcacgccgaactgatcgtgctgcggagaggcgattacgacgccggcacacatcaggtgcagtggcaggctcaagaggtggtggctcaggctagactggacggccacagatctatgaacccctgtcctctgtacgatgaacagaccggcacactgtttctgttctttatcgctatccccggccaagtgaccgagcagcagcagctgcagacaagagccaacgtgaccagactgtgttacgtgacctccaccgaccacggcagaacctggtctagccctagagatctgaccgacgccgccatcggacctgcctatagagagtggtccaccttcgccgttggacctggacactgtctccagctgcacgacagggctagatctctggtggtgcctgcctacgcctatagaaagctgcaccccaaacagcggcctattcctagcgccttctgctttctgagccacgatcacggcaggacatgggccagaggacatttcgtggcccaggacacactggaatgccaggtggccgaagtgtgtaccggcgagcagagagtcgtgaccctgaacgccagatctcacctgagattcagagtgcaggcccagagcacaaacgacggcctggatttccaagagagccagctggtcaagaaactggtggaacctcctccaaccggctgtcagggaagcgtgatcagctttccatctcctagaagcggccctggctctccttgtcagtggctgctgtatacacaccccacacacagctggcagagagccgatctgggcgcctacctgaatcctagacctcctgctcctgaggcttggagcgaacctgttctgctggccaagggcagcgctgcctacagcgatctgcagtctatgggcacaggccctgatggcagccctctgtttggctgtctgtacgaggccaacgactacgaagagatcgtgttcctgatgttcaccctgaagcaggcctttccagccgagtacctgcctcaagagcccaaatcttctgacaaaactcacacatgcccaccgtgcccagcacctgaactcctggggggaccgtcagtcttcctcttccccccaaaacccaaggacaccctcatgatctcccggacccctgaggtcacatgcgtggtggtggacgtgagccacgaagaccctgaggtcaagttcaactggtacgtggacggcgtggaggtgcataatgccaagacaaagccgcgggaggagcagtacaacagcacgtaccgtgtggtcagcgtcctcaccgtcctgcaccaggactggctgaatggcaaggagtacaagtgcaaggtctccaacaaagccctcccagcccccatcgagaaaaccatctccaaagccaaagggcagccccgagaaccacaggtctacaccctgcccccatcccgggaggagatgaccaagaaccaggtcagcctgacctgcctggtcaaaggcttctatcccagcgacatcgccgtggagtgggagagcaatgggcagccggagaacaactacaagaccacgcctcccgtgctggactccgacggctccttcttcctctatagcaagctcaccgtggacaagagcaggtggcagcaggggaacgtcttctcatgctccgtgatgcatgaggctctgcacaaccactacacgcagaagagcctctccctgtctccgggtaaa

SEQ ID NO: 224 - protein, 611 aa, Artificial Sequence
  Description of Artificial Sequence: Synthetic polypeptide
ASLPYLQKESVFQSGAHAYRIPALLYLPGQQSLLAFAEQRRSKKDEHAELIVLRRGDYDAGTHQVQWQAQEVVAQARLDGHRSMNPCPLYDEQTGTLFLFFIAIPGQVTEQQQLQTRANVTRLCYVTSTDHGRTWSSPRDLTDAAIGPAYREWSTFAVGPGHCLQLHDRARSLVVPAYAYRKLHPKQRPIPSAFCFLSHDHGRTWARGHFVAQDTLECQVAEVETGEQRVVTLNARSHLRFRVQAQSTNDGLDFQESQLVKKLVEPPPTGCQGSVISFPSPRSGPGSPAQWLLYTHPTHSWQRADLGAYLNPRPPAPEAWSEPVLLAKGSAAYSDLQSMGTGPDGSPLFGCLYEANDYEEIVFLMFTLKQAFPAEYLPQEPKSSDKTHTCPPCPAPELLGGPSVFLFPPKPKDTLMISRTPEVTCVVVDVSHEDPEVKFNWYVDGVEVHNAKTKPREEQYNSTYRVVSVLTVLHQDWLNGKEYKCKVSNKALPAPIEKTISKAKGQPREPQVYTLPPSREEMTKNQVSLTCLVKGFYPSDIAVEWESNGQPENNYKTTPPVLDSDGSFFLYSKLTVDKSRWQQGNVFSCSVMHEALHNHYTQKSLSLSPGK

SEQ ID NO: 225 - DNA, 1833 bp, Artificial Sequence
  Description of Artificial Sequence: Synthetic polynucleotide
gcatctctgccttacctgcagaaagaaagcgtgttccagtctggcgcccacgcctacagaattcccgctctgctgtatctgccaggccagcagtctctgctggctttcgctgaacagcggcggagcaagaaggatgagcacgccgaactgatcgtgctgcggagaggcgattacgacgccggcacacatcaggtgcagtggcaggctcaagaggtggtggctcaggctagactggacggccacagatctatgaacccctgtcctctgtacgatgaacagaccggcacactgtttctgttctttatcgctatccccggccaagtgaccgagcagcagcagctgcagacaagagccaacgtgaccagactgtgttacgtgacctccaccgaccacggcagaacctggtctagccctagagatctgaccgacgccgccatcggacctgcctatagagagtggtccaccttcgccgttggacctggacactgtctccagctgcacgacagggctagatctctggtggtgcctgcctacgcctatagaaagctgcaccccaaacagcggcctattcctagcgccttctgctttctgagccacgatcacggcaggacatgggccagaggacatttcgtggcccaggacacactggaatgccaggtggccgaagtggaaaccggcgagcagagagtcgtgaccctgaacgccagatctcacctgagattcagagtgcaggcccagagcacaaacgacggcctggatttccaagagagccagctggtcaagaaactggtggaacctcctccaaccggctgtcagggaagcgtgatcagctttccatctcctagaagcggccctggctctcctgctcagtggctgctgtatacacaccccacacacagctggcagagagccgatctgggcgcctacctgaatcctagacctcctgctcctgaggcttggagcgaacctgttctgctggccaagggcagcgctgcctacagcgatctgcagtctatgggcacaggccctgatggcagccctctgtttggctgtctgtacgaggccaacgactacgaagagatcgtgttcctgatgttcaccctgaagcaggcctttccagccgagtacctgcctcaagagcccaaatcttctgacaaaactcacacatgcccaccgtgcccagcacctgaactcctggggggaccgtcagtcttcctcttccccccaaaacccaaggacaccctcatgatctcccggacccctgaggtcacatgcgtggtggtggacgtgagccacgaagaccctgaggtcaagttcaactggtacgtggacggcgtggaggtgcataatgccaagacaaagccgcgggaggagcagtacaacagcacgtaccgtgtggtcagcgtcctcaccgtcctgcaccaggactggctgaatggcaaggagtacaagtgcaaggtctccaacaaagccctcccagcccccatcgagaaaaccatctccaaagccaaagggcagccccgagaaccacaggtctacaccctgcccccatcccgggaggagatgaccaagaaccaggtcagcctgacctgcctggtcaaaggcttctatcccagcgacatcgccgtggagtgggagagcaatgggcagccggagaacaactacaagaccacgcctcccgtgctggactccgacggctccttcttcctctatagcaagctcaccgtggacaagagcaggtggcagcaggggaacgtcttctcatgctccgtgatgcatgaggctctgcacaaccactacacgcagaagagcctctccctgtctccgggtaaa

SEQ ID NO: 226 - protein, 612 aa, Artificial Sequence
  Description of Artificial Sequence: Synthetic polypeptide
DASLPVLQKESVFQSGAHAYRIPALLYLPGQQSLLAFAEQRRSKKDEHAELIVLRRGDYDAGTHQVQWQAQEVVAQARLDGHRSMNPCPLYDEQTGTLFLFFIAIPGQVTEQQQLQTRANVTRLCYVTSTDHGRTWSSPRDLTDAAIGPAYREWSTFAVGPGHCLQLHDRARSLVVPAYAYRKLHPKQRPIPSAFCFLSHDHGRTWARGHFVAQDTLECQVAEVETGEQRVVTLNARSHLRFRVQAQSTNDGLDFQESQLVKKLVEPPPTGCQGSVISFPSPRSGPGSPAQWLLYTHPTHSWQRADLGAYLNPRPPAPEAWSEPVLLAKGSAAYSDLQSMGTGPDGSPLFGCLYEANDYEEIVFLMFTLKQAFPAEYLPQEPKSSDKTHTCPPCPAPELLGGPSVFLFPPKPKDTLMISRTPEVTCVVVDVSHEDPEVKFNWYVDGVEVHNAKTKPREEQYNSTYRVVSVLTVLHQDWLNGKEYKCKVSNKALPAPIEKTISKAKGQPREPQVYTLPPSREEMTKNQVSLTCLVKGFYPSDIAVEWESNGQPENNYKTTPPVLDSDGSFFLYSKLTVDKSRWQQGNVFSCSVMHEALHNHYTQKSLSLSPGK

SEQ ID NO: 227 - DNA, 1836 bp, Artificial Sequence
  Description of Artificial Sequence: Synthetic polynucleotide
gatgcatctctgcctgtgctgcagaaagaaagcgtgttccagtctggcgcccacgcctacagaattcccgctctgctgtatctgccaggccagcagtctctgctggctttcgctgaacagcggcggagcaagaaggatgagcacgccgaactgatcgtgctgcggagaggcgattacgacgccggcacacatcaggtgcagtggcaggctcaagaggtggtggctcaggctagactggacggccacagatctatgaacccctgtcctctgtacgatgaacagaccggcacactgtttctgttctttatcgctatccccggccaagtgaccgagcagcagcagctgcagacaagagccaacgtgaccagactgtgttacgtgacctccaccgaccacggcagaacctggtctagccctagagatctgaccgacgccgccatcggacctgcctatagagagtggtccaccttcgccgttggacctggacactgtctccagctgcacgacagggctagatctctggtggtgcctgcctacgcctatagaaagctgcaccccaaacagcggcctattcctagcgccttctgctttctgagccacgatcacggcaggacatgggccagaggacatttcgtggcccaggacacactggaatgccaggtggccgaagtggaaaccggcgagcagagagtcgtgaccctgaacgccagatctcacctgagattcagagtgcaggcccagagcacaaacgacggcctggatttccaagagagccagctggtcaagaaactggtggaacctcctccaaccggctgtcagggaagcgtgatcagctttccatctcctagaagcggccctggctctcctgctcagtggctgctgtatacacaccccacacacagctggcagagagccgatctgggcgcctacctgaatcctagacctcctgctcctgaggcttggagcgaacctgttctgctggccaagggcagcgctgcctacagcgatctgcagtctatgggcacaggccctgatggcagccctctgtttggctgtctgtacgaggccaacgactacgaagagatcgtgttcctgatgttcaccctgaagcaggcctttccagccgagtacctgcctcaagagcccaaatcttctgacaaaactcacacatgcccaccgtgcccagcacctgaactcctggggggaccgtcagtcttcctcttccccccaaaacccaaggacaccctcatgatctcccggacccctgaggtcacatgcgtggtggtggacgtgagccacgaagaccctgaggtcaagttcaactggtacgtggacggcgtggaggtgcataatgccaagacaaagccgcgggaggagcagtacaacagcacgtaccgtgtggtcagcgtcctcaccgtcctgcaccaggactggctgaatggcaaggagtacaagtgcaaggtctccaacaaagccctcccagcccccatcgagaaaaccatctccaaagccaaagggcagccccgagaaccacaggtctacaccctgcccccatcccgggaggagatgaccaagaaccaggtcagcctgacctgcctggtcaaaggcttctatcccagcgacatcgccgtggagtgggagagcaatgggcagccggagaacaactacaagaccacgcctcccgtgctggactccgacggctccttcttcctctatagcaagctcaccgtggacaagagcaggtggcagcaggggaacgtcttctcatgctccgtgatgcatgaggctctgcacaaccactacacgcagaagagcctctccctgtctccgggtaaa

SEQ ID NO: 228 - protein, 612 aa, Artificial Sequence; identical to SEQ ID NO: 163
  Description of Artificial Sequence: Synthetic polypeptide

SEQ ID NO: 229 - DNA, 1836 bp, Artificial Sequence
  Description of Artificial Sequence: Synthetic polynucleotide
gatgcatctctgccttacctgcagaaagaaagcgtgttccagtctggcgcccacgcctacagaattcccgctctgctgtatctgccaggccagcagtctctgctggctttcgctgaacagcgggccagcaagaaggatgagcacgccgaactgatcgtgctgcggagaggcgattacgacgccggcacacatcaggtgcagtggcaggctcaagaggtggtggctcaggctagactggacggccacagatctatgaacccctgtcctctgtacgatgaacagaccggcacactgtttctgttctttatcgctatccccggccaagtgaccgagcagcagcagctgcagacaagagccaacgtgaccagactgtgttacgtgacctccaccgaccacggcagaacctggtctagccctagagatctgaccgacgccgccatcggacctgcctatagagagtggtccaccttcgccgttggacctggacactgtctccagctgcacgacagggctagatctctggtggtgcctgcctacgcctatagaaagctgcaccccaaacagcggcctattcctagcgccttctgctttctgagccacgatcacggcaggacatgggccagaggacatttcgtggcccaggacacactggaatgccaggtggccgaagtggaaaccggcgagcagagagtcgtgaccctgaacgccagatctcacctgagattcagagtgcaggcccagagcacaaacgacggcctggatttccaagagagccagctggtcaagaaactggtggaacctcctccaaccggctgtcagggaagcgtgatcagctttccatctcctagaagcggccctggctctcctgctcagtggctgctgtatacacaccccacacacagctggcagagagccgatctgggcgcctacctgaatcctagacctcctgctcctgaggcttggagcgaacctgttctgctggccaagggcagcgctgcctacagcgatctgcagtctatgggcacaggccctgatggcagccctctgtttggctgtctgtacgaggccaacgactacgaagagatcgtgttcctgatgttcaccctgaagcaggcctttccagccgagtacctgcctcaagagcccaaatcttctgacaaaactcacacatgcccaccgtgcccagcacctgaactcctggggggaccgtcagtcttcctcttccccccaaaacccaaggacaccctcatgatctcccggacccctgaggtcacatgcgtggtggtggacgtgagccacgaagaccctgaggtcaagttcaactggtacgtggacggcgtggaggtgcataatgccaagacaaagccgcgggaggagcagtacaacagcacgtaccgtgtggtcagcgtcctcaccgtcctgcaccaggactggctgaatggcaaggagtacaagtgcaaggtctccaacaaagccctcccagcccccatcgagaaaaccatctccaaagccaaagggcagccccgagaaccacaggtctacaccctgcccccatcccgggaggagatgaccaagaaccaggtcagcctgacctgcctggtcaaaggcttctatcccagcgacatcgccgtggagtgggagagcaatgggcagccggagaacaactacaagaccacgcctcccgtgctggactccgacggctccttcttcctctatagcaagctcaccgtggacaagagcaggtggcagcaggggaacgtcttctcatgctccgtgatgcatgaggctctgcacaaccactacacgcagaagagcctctccctgtctccgggtaaa

SEQ ID NO: 230 - protein, 612 aa, Artificial Sequence
  Description of Artificial Sequence: Synthetic polypeptide
DASLPYLQKESVFQSGAHAYRIPALLYLPGQQSLLAFAEQRRSKKDEHAELIVLRRGDYDAPTHQVQWQAQEVVAQARLDGHRSMNPCPLYDEQTGTLFLFFIAIPGQVTEQQQLQTRANVTRLCYVTSTDHGRTWSSPRDLTDAAIGPAYREWSTFAVGPGHCLQLHDRARSLVVPAYAYRKLHPKQRPIPSAFCFLSHDHGRTWARGHFVAQDTLECQVAEVETGEQRVVTLNARSHLRFRVQAQSTNDGLDFQESQLVKKLVEPPPTGCQGSVISFPSPRSGPGSPAQWLLYTHPTHSWQRADLGAYLNPRPPAPEAWSEPVLLAKGSAAYSDLQSMGTGPDGSPLFGCLYEANDYEEIVFLMFTLKQAFPAEYLPQEPKSSDKTHTCPPCPAPELLGGPSVFLFPPKPKDTLMISRTPEVTCVVVDVSHEDPEVKFNWYVDGVEVHNAKTKPREEQYNSTYRVVSVLTVLHQDWLNGKEYKCKVSNKALPAPIEKTISKAKGQPREPQVYTLPPSREEMTKNQVSLTCLVKGFYPSDIAVEWESNGQPENNYKTTPPVLDSDGSFFLYSKLTVDKSRWQQGNVFSCSVMHEALHNHYTQKSLSLSPGK

SEQ ID NO: 231 - DNA, 1836 bp, Artificial Sequence
  Description of Artificial Sequence: Synthetic polynucleotide
gatgcatctctgccttacctgcagaaagaaagcgtgttccagtctggcgcccacgcctacagaattcccgctctgctgtatctgccaggccagcagtctctgctggctttcgctgaacagcggcggagcaagaaggatgagcacgccgaactgatcgtgctgcggagaggcgattacgacgcccctacacatcaggtgcagtggcaggctcaagaggtggtggctcaggctagactggacggccacagatctatgaacccctgtcctctgtacgatgaacagaccggcacactgtttctgttctttatcgctatccccggccaagtgaccgagcagcagcagctgcagacaagagccaacgtgaccagactgtgttacgtgacctccaccgaccacggcagaacctggtctagccctagagatctgaccgacgccgccatcggacctgcctatagagagtggtccaccttcgccgttggacctggacactgtctccagctgcacgacagggctagatctctggtggtgcctgcctacgcctatagaaagctgcaccccaaacagcggcctattcctagcgccttctgctttctgagccacgatcacggcaggacatgggccagaggacatttcgtggcccaggacacactggaatgccaggtggccgaagtggaaaccggcgagcagagagtcgtgaccctgaacgccagatctcacctgagattcagagtgcaggcccagagcacaaacgacggcctggatttccaagagagccagctggtcaagaaactggtggaacctcctccaaccggctgtcagggaagcgtgatcagctttccatctcctagaagcggccctggctctcctgctcagtggctgctgtatacacaccccacacacagctggcagagagccgatctgggcgcctacctgaatcctagacctcctgctcctgaggcttggagcgaacctgttctgctggccaagggcagcgctgcctacagcgatctgcagtctatgggcacaggccctgatggcagccctctgtttggctgtctgtacgaggccaacgactacgaagagatcgtgttcctgatgttcaccctgaagcaggcctttccagccgagtacctgcctcaagagcccaaatcttctgacaaaactcacacatgcccaccgtgcccagcacctgaactcctggggggaccgtcagtcttcctcttccccccaaaacccaaggacaccctcatgatctcccggacccctgaggtcacatgcgtggtggtggacgtgagccacgaagaccctgaggtcaagttcaactggtacgtggacggcgtggaggtgcataatgccaagacaaagccgcgggaggagcagtacaacagcacgtaccgtgtggtcagcgtcctcaccgtcctgcaccaggactggctgaatggcaaggagtacaagtgcaaggtctccaacaaagccctcccagcccccatcgagaaaaccatctccaaagccaaagggcagccccgagaaccacaggtctacaccctgcccccatcccgggaggagatgaccaagaaccaggtcagcctgacctgcctggtcaaaggcttctatcccagcgacatcgccgtggagtgggagagcaatgggcagccggagaacaactacaagaccacgcctcccgtgctggactccgacggctccttcttcctctatagcaagctcaccgtggacaagagcaggtggcagcaggggaacgtcttctcatgctccgtgatgcatgaggctctgcacaaccactacacgcagaagagcctctccctgtctccgggtaaa

SEQ ID NO: 232 - protein, 612 aa, Artificial Sequence
  Description of Artificial Sequence: Synthetic polypeptide
DASLPYLQKESVFQSGAHAYRIPALLYLPGQQSLLAFAEQRRSKKDEHAELIVLRRGDYDAGTHQVQWQAQEVVAQARLDGHRSMNPCPLYDAQTGTLFLFFIAIPGQVTEQQQLQTRANVTRLCYVTSTDHGRTWSSPRDLTDAAIGPAYREWSTFAVGPGHCLQLHDRARSLVVPAYAYRKLHPKQRPIPSAFCFLSHDHGRTWARGHFVAQDTLECQVAEVETGEQRVVTLNARSHLRFRVQAQSTNDGLDFQESQLVKKLVEPPPTGCQGSVISFPSPRSGPGSPAQWLLYTHPTHSWQRADLGAYLNPRPPAPEAWSEPVLLAKGSAAYSDLQSMGTGPDGSPLFGCLYEANDYEEIVFLMFTLKQAFPAEYLPQEPKSSDKTHTCPPCPAPELLGGPSVFLFPPKPKDTLMISRTPEVTCVVVDVSHEDPEVKFNWYVDGVEVHNAKTKPREEQYNSTYRVVSVLTVLHQDWLNGKEYKCKVSNKALPAPIEKTISKAKGQPREPQVYTLPPSREEMTKNQVSLTCLVKGFYPSDIAVEWESNGQPENNYKTTPPVLDSDGSFFLYSKLTVDKSRWQQGNVFSCSVMHEALHNHYTQKSLSLSPGK

SEQ ID NO: 233 - DNA, 1836 bp, Artificial Sequence
  Description of Artificial Sequence: Synthetic polynucleotide
gatgcatctctgccttacctgcagaaagaaagcgtgttccagtctggcgcccacgcctacagaattcccgctctgctgtatctgccaggccagcagtctctgctggctttcgctgaacagcggcggagcaagaaggatgagcacgccgaactgatcgtgctgcggagaggcgattacgacgccggcacacatcaggtgcagtggcaggctcaagaggtggtggctcaggctagactggacggccacagatctatgaacccctgtcctctgtacgatgcccagaccggcacactgtttctgttctttatcgctatccccggccaagtgaccgagcagcagcagctgcagacaagagccaacgtgaccagactgtgttacgtgacctccaccgaccacggcagaacctggtctagccctagagatctgaccgacgccgccatcggacctgcctatagagagtggtccaccttcgccgttggacctggacactgtctccagctgcacgacagggctagatctctggtggtgcctgcctacgcctatagaaagctgcaccccaaacagcggcctattcctagcgccttctgctttctgagccacgatcacggcaggacatgggccagaggacatttcgtggcccaggacacactggaatgccaggtggccgaagtggaaaccggcgagcagagagtcgtgaccctgaacgccagatctcacctgagattcagagtgcaggcccagagcacaaacgacggcctggatttccaagagagccagctggtcaagaaactggtggaacctcctccaaccggctgtcagggaagcgtgatcagctttccatctcctagaagcggccctggctctcctgctcagtggctgctgtatacacaccccacacacagctggcagagagccgatctgggcgcctacctgaatcctagacctcctgctcctgaggcttggagcgaacctgttctgctggccaagggcagcgctgcctacagcgatctgcagtctatgggcacaggccctgatggcagccctctgtttggctgtctgtacgaggccaacgactacgaagagatcgtgttcctgatgttcaccctgaagcaggcctttccagccgagtacctgcctcaagagcccaaatcttctgacaaaactcacacatgcccaccgtgcccagcacctgaactcctggggggaccgtcagtcttcctcttccccccaaaacccaaggacaccctcatgatctcccggacccctgaggtcacatgcgtggtggtggacgtgagccacgaagaccctgaggtcaagttcaactggtacgtggacggcgtggaggtgcataatgccaagacaaagccgcgggaggagcagtacaacagcacgtaccgtgtggtcagcgtcctcaccgtcctgcaccaggactggctgaatggcaaggagtacaagtgcaaggtctccaacaaagccctcccagcccccatcgagaaaaccatctccaaagccaaagggcagccccgagaaccacaggtctacaccctgcccccatcccgggaggagatgaccaagaaccaggtcagcctgacctgcctggtcaaaggcttctatcccagcgacatcgccgtggagtgggagagcaatgggcagccggagaacaactacaagaccacgcctcccgtgctggactccgacggctccttcttcctctatagcaagctcaccgtggacaagagcaggtggcagcaggggaacgtcttctcatgctccgtgatgcatgaggctctgcacaaccactacacgcagaagagcctctccctgtctccgggtaaa

SEQ ID NO: 234 - protein, 612 aa, Artificial Sequence
  Description of Artificial Sequence: Synthetic polypeptide
DASLPYLQKESVFQSGAHAYRIPALLYLPGQQSLLAFAEQRRSKKDEHAELIVLRRGDYDAGTHQVQWQAQEVVAQARLDGHRSMNPCPLYDEQTGTLFLFFIAIPGQVTEQQQLQTRANVTRLCQVTSTDHGRTWSSPRDLTDAAIGPAYREWSTFAVGPGHCLQLHDRARSLVVPAYAYRKLHPKQRPIPSAFCFLSHDHGRTWARGHFVAQDTLECQVAEVETGEQRVVTLNARSHLRFRVQAQSTNDGLDFQESQLVKKLVEPPPTGCQGSVISFPSPRSGPGSPAQWLLYTHPTHSWQRADLGAYLNPRPPAPEAWSEPVLLAKGSAAYSDLQSMGTGPDGSPLFGCLYEANDYEEIVFLMFTLKQAFPAEYLPQEPKSSDKTHTCPPCPAPELLGGPSVFLFPPKPKDTLMISRTPEVTCVVVDVSHEDPEVKFNWYVDGVEVHNAKTKPREEQYNSTYRVVSVLTVLHQDWLNGKEYKCKVSNKALPAPIEKTISKAKGQPREPQVYTLPPSREEMTKNQVSLTCLVKGFYPSDIAVEWESNGQPENNYKTTPPVLDSDGSFFLYSKLTVDKSRWQQGNVFSCSVMHEALHNHYTQKSLSLSPGK

SEQ ID NO: 235 - DNA, 1836 bp, Artificial Sequence
  Description of Artificial Sequence: Synthetic polynucleotide
gatgcatctctgccttacctgcagaaagaaagcgtgttccagtctggcgcccacgcctacagaattcccgctctgctgtatctgccaggccagcagtctctgctggctttcgctgaacagcggcggagcaagaaggatgagcacgccgaactgatcgtgctgcggagaggcgattacgacgccggcacacatcaggtgcagtggcaggctcaagaggtggtggctcaggctagactggacggccacagatctatgaacccctgtcctctgtacgatgaacagaccggcacactgtttctgttctttatcgctatccccggccaagtgaccgagcagcagcagctgcagacaagagccaacgtgaccagactgtgtcaggtgacctccaccgaccacggcagaacctggtctagccctagagatctgaccgacgccgccatcggacctgcctatagagagtggtccaccttcgccgttggacctggacactgtctccagctgcacgacagggctagatctctggtggtgcctgcctacgcctatagaaagctgcaccccaaacagcggcctattcctagcgccttctgctttctgagccacgatcacggcaggacatgggccagaggacatttcgtggcccaggacacactggaatgccaggtggccgaagtggaaaccggcgagcagagagtcgtgaccctgaacgccagatctcacctgagattcagagtgcaggcccagagcacaaacgacggcctggatttccaagagagccagctggtcaagaaactggtggaacctcctccaaccggctgtcagggaagcgtgatcagctttccatctcctagaagcggccctggctctcctgctcagtggctgctgtatacacaccccacacacagctggcagagagccgatctgggcgcctacctgaatcctagacctcctgctcctgaggcttggagcgaacctgttctgctggccaagggcagcgctgcctacagcgatctgcagtctatgggcacaggccctgatggcagccctctgtttggctgtctgtacgaggccaacgactacgaagagatcgtgttcctgatgttcaccctgaagcaggcctttccagccgagtacctgcctcaagagcccaaatcttctgacaaaactcacacatgcccaccgtgcccagcacctgaactcctggggggaccgtcagtcttcctcttccccccaaaacccaaggacaccctcatgatctcccggacccctgaggtcacatgcgtggtggtggacgtgagccacgaagaccctgaggtcaagttcaactggtacgtggacggcgtggaggtgcataatgccaagacaaagccgcgggaggagcagtacaacagcacgtaccgtgtggtcagcgtcctcaccgtcctgcaccaggactggctgaatggcaaggagtacaagtgcaaggtctccaacaaagccctcccagcccccatcgagaaaaccatctccaaagccaaagggcagccccgagaaccacaggtctacaccctgcccccatcccgggaggagatgaccaagaaccaggtcagcctgacctgcctggtcaaaggcttctatcccagcgacatcgccgtggagtgggagagcaatgggcagccggagaacaactacaagaccacgcctcccgtgctggactccgacggctccttcttcctctatagcaagctcaccgtggacaagagcaggtggcagcaggggaacgtcttctcatgctccgtgatgcatgaggctctgcacaaccactacacgcagaagagcctctccctgtctccgggtaaa

SEQ ID NO: 236 - protein, 612 aa, Artificial Sequence
  Description of Artificial Sequence: Synthetic polypeptide
DASLPYLQKESVFQSGAHAYRIPALLYLPGQQSLLAFAEQRRSKKDEHAELIVLRRGDYDAGTHQVQWQAQEVVAQARLDGHRSMNPCPLYDEQTGTLFLFFIAIPGQVTEQQQLQTRANVTRLCYVTSTDHGRTWSSPRDLTDAAIGPAYREWSTFAVGPGHCLQLHDRARSLVVPAYAYRKLHPIQRPIPSAFCFLSHDHGRTWARGHFVAQDTLECQVAEVETGEQRVVTLNARSHLRFRVQAQSTNDGLDFQESQLVKKLVEPPPTGCQGSVISFPSPRSGPGSPAQWLLYTHPTHSWQRADLGAYLNPRPPAPEAWSEPVLLAKGSAAYSDLQSMGTGPDGSPLFGCLYEANDYEEIVFLMFTLKQAFPAEYLPQEPKSSDKTHTCPPCPAPELLGGPSVFLFPPKPKDTLMISRTPEVTCVVVDVSHEDPEVKFNWYVDGVEVHNAKTKPREEQYNSTYRVVSVLTVLHQDWLNGKEYKCKVSNKALPAPIEKTISKAKGQPREPQVYTLPPSREEMTKNQVSLTCLVKGFYPSDIAVEWESNGQPENNYKTTPPVLDSDGSFFLYSKLTVDKSRWQQGNVFSCSVMHEALHNHYTQKSLSLSPGK

SEQ ID NO: 237 - DNA, 1836 bp, Artificial Sequence
  Description of Artificial Sequence: Synthetic polynucleotide
gatgcatctctgccttacctgcagaaagaaagcgtgttccagtctggcgcccacgcctacagaattcccgctctgctgtatctgccaggccagcagtctctgctggctttcgctgaacagcggcggagcaagaaggatgagcacgccgaactgatcgtgctgcggagaggcgattacgacgccggcacacatcaggtgcagtggcaggctcaagaggtggtggctcaggctagactggacggccacagatctatgaacccctgtcctctgtacgatgaacagaccggcacactgtttctgttctttatcgctatccccggccaagtgaccgagcagcagcagctgcagacaagagccaacgtgaccagactgtgttacgtgacctccaccgaccacggcagaacctggtctagccctagagatctgaccgacgccgccatcggacctgcctatagagagtggtccaccttcgccgttggacctggacactgtctccagctgcacgacagggctagatctctggtggtgcctgcctacgcctatagaaagctgcaccccatccagcggcctattcctagcgccttctgctttctgagccacgatcacggcaggacatgggccagaggacatttcgtggcccaggacacactggaatgccaggtggccgaagtggaaaccggcgagcagagagtcgtgaccctgaacgccagatctcacctgagattcagagtgcaggcccagagcacaaacgacggcctggatttccaagagagccagctggtcaagaaactggtggaacctcctccaaccggctgtcagggaagcgtgatcagctttccatctcctagaagcggccctggctctcctgctcagtggctgctgtatacacaccccacacacagctggcagagagccgatctgggcgcctacctgaatcctagacctcctgctcctgaggcttggagcgaacctgttctgctggccaagggcagcgctgcctacagcgatctgcagtctatgggcacaggccctgatggcagccctctgtttggctgtctgtacgaggccaacgactacgaagagatcgtgttcctgatgttcaccctgaagcaggcctttccagccgagtacctgcctcaagagcccaaatcttctgacaaaactcacacatgcccaccgtgcccagcacctgaactcctggggggaccgtcagtcttcctcttccccccaaaacccaaggacaccctcatgatctcccggacccctgaggtcacatgcgtggtggtggacgtgagccacgaagaccctgaggtcaagttcaactggtacgtggacggcgtggaggtgcataatgccaagacaaagccgcgggaggagcagtacaacagcacgtaccgtgtggtcagcgtcctcaccgtcctgcaccaggactggctgaatggcaaggagtacaagtgcaaggtctccaacaaagccctcccagcccccatcgagaaaaccatctccaaagccaaagggcagccccgagaaccacaggtctacaccctgcccccatcccgggaggagatgaccaagaaccaggtcagcctgacctgcctggtcaaaggcttctatcccagcgacatcgccgtggagtgggagagcaatgggcagccggagaacaactacaagaccacgcctcccgtgctggactccgacggctccttcttcctctatagcaagctcaccgtggacaagagcaggtggcagcaggggaacgtcttctcatgctccgtgatgcatgaggctctgcacaaccactacacgcagaagagcctctccctgtctccgggtaaa

SEQ ID NO: 238 - protein, 612 aa, Artificial Sequence
  Description of Artificial Sequence: Synthetic polypeptide
DASLPYLQKESVFQSGAHAYRIPALLYLPGQQSLLAFAEQRRSKKDEHAELIVLRRGDYDAGTHQVQWQAQEVVAQARLDGHRSMNPCPLYDEQTGTLFLFFIAIPGQVTEQQQLQTRANVTRLCYVTSTDHGRTWSSPRDLTDAAIGPAYREWSTFAVGPGHCLQLHDRARSLVVPAYAYRKLHPKQRPIPSAFCFLSHDHGRTWARGHFVAQDTLECQVAEVETGEQRVVTLNARSHLRARVQAQSTNDGLDFQESQLVKKLVEPPPTGCQGSVISFPSPRSGPGSPAQWLLYTHPTHSWQRADLGAYLNPRPPAPEAWSEPVLLAKGSAAYSDLQSMGTGPDGSPLFGCLYEANDYEEIVFLMFTLKQAFPAEYLPQEPKSSDKTHTCPPCPAPELLGGPSVFLFPPKPKDTLMISRTPEVTCVVVDVSHEDPEVKFNWYVDGVEVHNAKTKPREEQYNSTYRVVSVLTVLHQDWLNGKEYKCKVSNKALPAPIEKTISKAKGQPREPQVYTLPPSREEMTKNQVSLTCLVKGFYPSDIAVEWESNGQPENNYKTTPPVLDSDGSFFLYSKLTVDKSRWQQGNVFSCSVMHEALHNHYTQKSLSLSPGK

SEQ ID NO: 239 - DNA, 1836 bp, Artificial Sequence
  Description of Artificial Sequence: Synthetic polynucleotide
gatgcatctctgccttacctgcagaaagaaagcgtgttccagtctggcgcccacgcctacagaattcccgctctgctgtatctgccaggccagcagtctctgctggctttcgctgaacagcggcggagcaagaaggatgagcacgccgaactgatcgtgctgcggagaggcgattacgacgccggcacacatcaggtgcagtggcaggctcaagaggtggtggctcaggctagactggacggccacagatctatgaacccctgtcctctgtacgatgaacagaccggcacactgtttctgttctttatcgctatccccggccaagtgaccgagcagcagcagctgcagacaagagccaacgtgaccagactgtgttacgtgacctccaccgaccacggcagaacctggtctagccctagagatctgaccgacgccgccatcggacctgcctatagagagtggtccaccttcgccgttggacctggacactgtctccagctgcacgacagggctagatctctggtggtgcctgcctacgcctatagaaagctgcaccccaaacagcggcctattcctagcgccttctgctttctgagccacgatcacggcaggacatgggccagaggacatttcgtggcccaggacacactggaatgccaggtggccgaagtggaaaccggcgagcagagagtcgtgaccctgaacgccagatctcacctgagagccagagtgcaggcccagagcacaaacgacggcctggatttccaagagagccagctggtcaagaaactggtggaacctcctccaaccggctgtcagggaagcgtgatcagctttccatctcctagaagcggccctggctctcctgctcagtggctgctgtatacacaccccacacacagctggcagagagccgatctgggcgcctacctgaatcctagacctcctgctcctgaggcttggagcgaacctgttctgctggccaagggcagcgctgcctacagcgatctgcagtctatgggcacaggccctgatggcagccctctgtttggctgtctgtacgaggccaacgactacgaagagatcgtgttcctgatgttcaccctgaagcaggcctttccagccgagtacctgcctcaagagcccaaatcttctgacaaaactcacacatgcccaccgtgcccagcacctgaactcctggggggaccgtcagtcttcctcttccccccaaaacccaaggacaccctcatgatctcccggacccctgaggtcacatgcgtggtggtggacgtgagccacgaagaccctgaggtcaagttcaactggtacgtggacggcgtggaggtgcataatgccaagacaaagccgcgggaggagcagtacaacagcacgtaccgtgtggtcagcgtcctcaccgtcctgcaccaggactggctgaatggcaaggagtacaagtgcaaggtctccaacaaagccctcccagcccccatcgagaaaaccatctccaaagccaaagggcagccccgagaaccacaggtctacaccctgcccccatcccgggaggagatgaccaagaaccaggtcagcctgacctgcctggtcaaaggcttctatcccagcgacatcgccgtggagtgggagagcaatgggcagccggagaacaactacaagaccacgcctcccgtgctggactccgacggctccttcttcctctatagcaagctcaccgtggacaagagcaggtggcagcaggggaacgtcttctcatgctccgtgatgcatgaggctctgcacaaccactacacgcagaagagcctctccctgtctccgggtaaa

SEQ ID NO: 240 - protein, 612 aa, Artificial Sequence
  Description of Artificial Sequence: Synthetic polypeptide
DASLPYLQKESVFQSGAHAYRIPALLYLPGQQSLLAFAEQRRSKKDEHAELIVLRRGDYDAGTHQVQWQAQEVVAQARLDGHRSMNPCPLYDEQTGTLFLFFIAIPGQVTEQQQLQTRANVTRLCYVTSTDHGRTWSSPRDLTDAAIGPAYREWSTFAVGPGHCLQLHDRARSLVVPAYAYRKLHPKQRPIPSAFCFLSHDHGRTWARGHFVAQDTLECQVAEVETGEQRVVTLNARSHLRFRVQAQSTNDGLDFQESQLVKKLVEPPPQGCQGSVISFPSPRSGPGSPAQWLLYTHPTHSWQRADLGAYLNPRPPAPEAWSEPVLLAKGSAAYSDLQSMGTGPDGSPLFGCLYEANDYEEIVFLMFTLKQAFPAEYLPQEPKSSDKTHTCPPCPAPELLGGPSVFLFPPKPKDTLMISRTPEVTCVVVDVSHEDPEVKFNWYVDGVEVHNAKTKPREEQYNSTYRVVSVLTVLHQDWLNGKEYKCKVSNKALPAPIEKTISKAKGQPREPQVYTLPPSREEMTKNQVSLTCLVKGFYPSDIAVEWESNGQPENNYKTTPPVLDSDGSFFLYSKLTVDKSRWQQGNVFSCSVMHEALHNHYTQKSLSLSPGK

SEQ ID NO: 241 - DNA, 1836 bp, Artificial Sequence
  Description of Artificial Sequence: Synthetic polynucleotide
gatgcatctctgccttacctgcagaaagaaagcgtgttccagtctggcgcccacgcctacagaattcccgctctgctgtatctgccaggccagcagtctctgctggctttcgctgaacagcggcggagcaagaaggatgagcacgccgaactgatcgtgctgcggagaggcgattacgacgccggcacacatcaggtgcagtggcaggctcaagaggtggtggctcaggctagactggacggccacagatctatgaacccctgtcctctgtacgatgaacagaccggcacactgtttctgttctttatcgctatccccggccaagtgaccgagcagcagcagctgcagacaagagccaacgtgaccagactgtgttacgtgacctccaccgaccacggcagaacctggtctagccctagagatctgaccgacgccgccatcggacctgcctatagagagtggtccaccttcgccgttggacctggacactgtctccagctgcacgacagggctagatctctggtggtgcctgcctacgcctatagaaagctgcaccccaaacagcggcctattcctagcgccttctgctttctgagccacgatcacggcaggacatgggccagaggacatttcgtggcccaggacacactggaatgccaggtggccgaagtggaaaccggcgagcagagagtcgtgaccctgaacgccagatctcacctgagattcagagtgcaggcccagagcacaaacgacggcctggatttccaagagagccagctggtcaagaaactggtggaacctcctccacagggctgtcagggaagcgtgatcagctttccatctcctagaagcggccctggctctcctgctcagtggctgctgtatacacaccccacacacagctggcagagagccgatctgggcgcctacctgaatcctagacctcctgctcctgaggcttggagcgaacctgttctgctggccaagggcagcgctgcctacagcgatctgcagtctatgggcacaggccctgatggcagccctctgtttggctgtctgtacgaggccaacgactacgaagagatcgtgttcctgatgttcaccctgaagcaggcctttccagccgagtacctgcctcaagagcccaaatcttctgacaaaactcacacatgcccaccgtgcccagcacctgaactcctggggggaccgtcagtcttcctcttccccccaaaacccaaggacaccctcatgatctcccggacccctgaggtcacatgcgtggtggtggacgtgagccacgaagaccctgaggtcaagttcaactggtacgtggacggcgtggaggtgcataatgccaagacaaagccgcgggaggagcagtacaacagcacgtaccgtgtggtcagcgtcctcaccgtcctgcaccaggactggctgaatggcaaggagtacaagtgcaaggtctccaacaaagccctcccagcccccatcgagaaaaccatctccaaagccaaagggcagccccgagaaccacaggtctacaccctgcccccatcccgggaggagatgaccaagaaccaggtcagcctgacctgcctggtcaaaggcttctatcccagcgacatcgccgtggagtgggagagcaatgggcagccggagaacaactacaagaccacgcctcccgtgctggactccgacggctccttcttcctctatagcaagctcaccgtggacaagagcaggtggcagcaggggaacgtcttctcatgctccgtgatgcatgaggctctgcacaaccactacacgcagaagagcctctccctgtctccgggtaaa

SEQ ID NO: 242 - protein, 612 aa, Artificial Sequence
  Description of Artificial Sequence: Synthetic polypeptide
DASLPYLQKESVFQSGAHAYRIPALLYLPGQQSLLAFAEQRRSKKDEHAELIVLRRGDYDAGTHQVQWQAQEVVAQARLDGHRSMNPCPLYDEQTGTLFLFFIAIPGQVTEQQQLQTRANVTRLCYVTSTDHGRTWSSPRDLTDAAIGPAYREWSTFAVGPGHCLQLHDRARSLVVPAYAYRKLHPKQRPIPSAFCFLSHDHGRTWARGHFVAQDTLECQVAEVETGEQRVVTLNARSHLRFRVQAQSTNDGLDFQESQLVKKLVEPPPTGCQGSVISFPSPRSGPGSPAQWLLYTHPTHSWQRADLGAYLNPRPPAPEAWSEPVLLAKGSCAYSDLQSMGTGPDGSPLFGCLYEANDYEEIVFLMFTLKQAFPAEYLPQEPKSSDKTHTCPPCPAPELLGGPSVFLFPPKPKDTLMISRTPEVTCVVVDVSHEDPEVKFNWYVDGVEVHNAKTKPREEQYNSTYRVVSVLTVLHQDWLNGKEYKCKVSNKALPAPIEKTISKAKGQPREPQVYTLPPSREEMTKNQVSLTCLVKGFYPSDIAVEWESNGQPENNYKTTPPVLDSDGSFFLYSKLTVDKSRWQQGNVFSCSVMHEALHNHYTQKSLSLSPGK

SEQ ID NO: 243 - DNA, 1836 bp, Artificial Sequence
  Description of Artificial Sequence: Synthetic polynucleotide
gatgcatctctgccttacctgcagaaagaaagcgtgttccagtctggcgcccacgcctacagaattcccgctctgctgtatctgccaggccagcagtctctgctggctttcgctgaacagcggcggagcaagaaggatgagcacgccgaactgatcgtgctgcggagaggcgattacgacgccggcacacatcaggtgcagtggcaggctcaagaggtggtggctcaggctagactggacggccacagatctatgaacccctgtcctctgtacgatgaacagaccggcacactgtttctgttctttatcgctatccccggccaagtgaccgagcagcagcagctgcagacaagagccaacgtgaccagactgtgttacgtgacctccaccgaccacggcagaacctggtctagccctagagatctgaccgacgccgccatcggacctgcctatagagagtggtccaccttcgccgttggacctggacactgtctccagctgcacgacagggctagatctctggtggtgcctgcctacgcctatagaaagctgcaccccaaacagcggcctattcctagcgccttctgctttctgagccacgatcacggcaggacatgggccagaggacatttcgtggcccaggacacactggaatgccaggtggccgaagtggaaaccggcgagcagagagtcgtgaccctgaacgccagatctcacctgagattcagagtgcaggcccagagcacaaacgacggcctggatttccaagagagccagctggtcaagaaactggtggaacctcctccaaccggctgtcagggaagcgtgatcagctttccatctcctagaagcggccctggctctcctgctcagtggctgctgtatacacaccccacacacagctggcagagagccgatctgggcgcctacctgaatcctagacctcctgctcctgaggcttggagcgaacctgttctgctggccaagggcagctgtgcctacagcgatctgcagtctatgggcacaggccctgatggcagccctctgtttggctgtctgtacgaggccaacgactacgaagagatcgtgttcctgatgttcaccctgaagcaggcctttccagccgagtacctgcctcaagagcccaaatcttctgacaaaactcacacatgcccaccgtgcccagcacctgaactcctggggggaccgtcagtcttcctcttccccccaaaacccaaggacaccctcatgatctcccggacccctgaggtcacatgcgtggtggtggacgtgagccacgaagaccctgaggtcaagttcaactggtacgtggacggcgtggaggtgcataatgccaagacaaagccgcgggaggagcagtacaacagcacgtaccgtgtggtcagcgtcctcaccgtcctgcaccaggactggctgaatggcaaggagtacaagtgcaaggtctccaacaaagccctcccagcccccatcgagaaaaccatctccaaagccaaagggcagccccgagaaccacaggtctacaccctgcccccatcccgggaggagatgaccaagaaccaggtcagcctgacctgcctggtcaaaggcttctatcccagcgacatcgccgtggagtgggagagcaatgggcagccggagaacaactacaagaccacgcctcccgtgctggactccgacggctccttcttcctctatagcaagctcaccgtggacaagagcaggtggcagcaggggaacgtcttctcatgctccgtgatgcatgaggctctgcacaaccactacacgcagaagagcctctccctgtctccgggtaaa

SEQ ID NO: 244 - protein, 874 aa, Artificial Sequence
  Description of Artificial Sequence: Synthetic polypeptide
DASLPYLQKESVFQSGAHAYRIPALLYLPGQQSLLAFAEQRRSKKDEHAELIVLRRGDYDAGTHQVQWQAQEVVAQARLDGHRSMNPCPLYDEQTGTLFLFFIAIPGQVTEQQQLQTRANVTRLCYVTSTDHGRTWSSPRDLTDAAIGPAYREWSTFAVGPGHCLQLHDRARSLVVPAYAYRKLHPKQRPIPSAFCFLSHDHGRTWARGHFVAQDTLECQVAEVETGEQRVVTLNARSHLRFRVQAQSTNDGLDFQESQLVKKLVEPPPTGCQGSVISFPSPRSGPGSPAQWLLYTHPTHSWQRADLGAYLNPRPPAPEAWSEPVLLAKGSAAYSDLQSMGTGPDGSPLFGCLYEANDYEEIVFLMFTLKQAFPAEYLPQGGGGSGGGGSDKTHTCPPCPAPELLGGPSVFLFPPKPKDTLMISRTPEVTCVVVDVSHEDPEVKFNWYVDGVEVHNAKTKPREEQYNSTYRVVSVLTVLHQDWLNGKEYKCKVSNKALPAPIEKTISKAKGQPREPQVYTLPPSREEMTKNQVSLTCLVKGFYPSDIAVEWESNGQPENNYKTTPPVLDSDGSFFLYSKLTVDKSRWQQGNVFSCSVMHEALHNHYTQKSLSLSPGKGGGGSGGGGSGGGGSEVQLVESGGGLVQPGGSLRLSCAASGFNIKDTYIHWVRQAPGKGLEWVARIYPTNGYTRYADSVKGRFTISADTSKNTAYLQMNSLRAEDTAVYYCSRWGGDGFYAMDYWGQGTLVTVSSGGGGSGGGGSGGGGSDIQMTQSPSSLSASVGDRVTITCRASQDVNTAVAWYQQKPGKAPKLLIYSASFLYSGVPSRFSGSRSGTDFTLTISSLQPEDFATYYCQQHYTTPPTFGQGTKVEIK

SEQ ID NO: 245 - DNA, 1350 bp, Artificial Sequence
  Description of Artificial Sequence: Synthetic polynucleotide
gaggtgcagctggttgaatctggcggaggactggttcagcctggcggatctctgagactgtcttgtgccgccagcggcttcaacatcaaggacacctacatccactgggtccgacaggcccctggcaaaggacttgaatgggtcgccagaatctaccccaccaacggctacaccagatacgccgactctgtgaagggcagattcaccatcagcgccgacaccagcaagaacaccgcctacctgcagatgaacagcctgagagccgaggacaccgccgtgtactactgttctagatggggaggcgacggcttctacgccatggattattggggccagggcaccctggtcaccgtttcttctgctagcaccaagggcccatccgtcttccccctggcaccctcctccaagagcacctctgggggcacagcggccctgggctgcctggtcaaggactacttccccgaaccggtgacggtgtcctggaactcaggcgctctgaccagcggcgtgcacaccttcccggctgtcctacagtcctcaggactctactccctcagcagcgtggtgaccgtgccctccagcagcttgggcacccagacctacatctgcaacgtgaatcacaagcccagcaacaccaaggtggacaagaaagttgagcccaaatcttgtgacaaaactcacacatgcccaccgtgcccagcacctgaactcctggggggaccgtcagtcttcctcttccccccaaaacccaaggacaccctcatgatctcccggacccctgaggtcacatgcgtggtggtggacgtgagccacgaagaccctgaggtcaagttcaactggtacgtggacggcgtggaggtgcataatgccaagacaaagccgcgggaggagcagtacaacagcacgtaccgtgtggtcagcgtcctcaccgtcctgcaccaggactggctgaatggcaaggagtacaagtgcaaggtctccaacaaagccctcccagcccccatcgagaaaaccatctccaaagccaaagggcagccccgagaaccacaggtctacaccctgcccccatcccgggaggagatgaccaagaaccaggtcagcctgacctgcctggtcaaaggcttctatcccagcgacatcgccgtggagtgggagagcaatgggcagccggagaacaactacaagaccacgcctcccgtgctggactccgacggctccttcttcctcaccagcaagctcaccgtggacaagagcaggtggcagcaggggaacgtcttctcatgctccgtgatgcatgaggctctgcacaaccactacacgcagaagagcctctccctgtctccgggtaaa

SEQ ID NO: 246 - DNA, 1836 bp, Artificial Sequence
  Description of Artificial Sequence: Synthetic polynucleotide
gatgcatctctgccttacctgcagaaagaaagcgtgttccagtctggcgcccacgcctacagaattcccgctctgctgtatctgccaggccagcagtctctgctggctttcgctgaacagcggcggagcaagaaggatgagcacgccgaactgatcgtgctgcggagaggcgattacgacgccggcacacatcaggtgcagtggcaggctcaagaggtggtggctcaggctagactggacggccacagatctatgaacccctgtcctctgtacgatgaacagaccggcacactgtttctgttctttatcgctatccccggccaagtgaccgagcagcagcagctgcagacaagagccaacgtgaccagactgtgttacgtgacctccaccgaccacggcagaacctggtctagccctagagatctgaccgacgccgccatcggacctgcctatagagagtggtccaccttcgccgttggacctggacactgtctccagctgcacgacagggctagatctctggtggtgcctgcctacgcctatagaaagctgcaccccaaacagcggcctattcctagcgccttctgctttctgagccacgatcacggcaggacatgggccagaggacatttcgtggcccaggacacactggaatgccaggtggccgaagtggaaaccggcgagcagagagtcgtgaccctgaacgccagatctcacctgagattcagagtgcaggcccagagcacaaacgacggcctggatttccaagagagccagctggtcaagaaactggtggaacctcctccaaccggctgtcagggaagcgtgatcagctttccatctcctagaagcggccctggctctcctgctcagtggctgctgtatacacaccccacacacagctggcagagagccgatctgggcgcctacctgaatcctagacctcctgctcctgaggcttggagcgaacctgttctgctggccaagggcagcgctgcctacagcgatctgcagtctatgggcacaggccctgatggcagccctctgtttggctgtctgtacgaggccaacgactacgaagagatcgtgttcctgatgttcaccctgaagcaggcctttccagccgagtacctgcctcaagagcccaaatcttctgacaaaactcacacatgcccaccgtgcccagcacctgaactcctggggggaccgtcagtcttcctcttccccccaaaacccaaggacaccctcatgatctcccggacccctgaggtcacatgcgtggtggtggacgtgagccacgaagaccctgaggtcaagttcaactggtacgtggacggcgtggaggtgcataatgccaagacaaagccgcgggaggagcagtacaacagcacgtaccgtgtggtcagcgtcctcaccgtcctgcaccaggactggctgaatggcaaggagtacaagtgcaaggtctccaacaaagccctcccagcccccatcgagaaaaccatctccaaagccaaagggcagccccgagaaccacaggtctacaccctgcccccatcccgggaggagatgaccaagaaccaggtcagcctgtactgcctggtcaaaggcttctatcccagcgacatcgccgtggagtgggagagcaatgggcagccggagaacaactacaagaccacgcctcccgtgctggactccgacggctccttcttcctctatagcaagctcaccgtggacaagagcaggtggcagcaggggaacgtcttctcatgctccgtgatgcatgaggctctgcacaaccactacacgcagaagagcctctccctgtctccgggtaaa

SEQ ID NO: 247 - protein, 874 aa, Artificial Sequence
  Description of Artificial Sequence: Synthetic polypeptide
  MOD_RES (1)..(1): Ala, Arg, Asn, Asp, Gln, Glu, Gly, His, Leu, Lys, Met, Phe, Thr, Val, or not present
  MOD_RES (6)..(6): Phe, Trp, Tyr or Val
  MOD_RES (9)..(9): Lys or Asp
  MOD_RES (42)..(42): Arg or Ala
  MOD_RES (62)..(62): Pro, Asn, Asp, His, Glu, Gly, Ser or Thr
  MOD_RES (93)..(93): Ala, Glu, or Lys
  MOD_RES (126)..(126): Gln, Leu, Glu, Phe, His, Ile, Leu, or Tyr
  MOD_RES (187)..(187): Arg, Ile, or Lys
  MOD_RES (242)..(242): Ala, Cys, Phe, Gly, His, Ile, Lys, Leu, Met, Asn, Gln, Arg, Ser, Val, Trp, or Tyr
  MOD_RES (270)..(270): Gln, Ala, His, Phe, Pro, Ser, or Thr
  MOD_RES (301)..(301): Ser, Arg, Ala, Asp, Glu, Phe, Gly, His, Ile, Lys, Leu, Met, Asn, Pro, Gln, Thr, Val, Trp, or Tyr
  MOD_RES (302)..(302): Trp, Lys, Ala, Asp, Glu, Phe, Gly, His, Ile, Lys, Leu, Met, Asn, Pro, Gln, Arg, Ser, Thr, Val, or Tyr
  MOD_RES (332)..(332): Ala, Cys, Ser, or Val
  MOD_RES (363)..(363): Val or Arg
  MOD_RES (365)..(365): Leu, Gln, His, Ile, Lys, or Ser
  MOD_RES (381)..(390): This region may encompass one of the following sequences: "GGGGS" or "GGGGSGGGGS" or "EPKSS"
XASLPXLQXESVFQSGAHAYRIPALLYLPGQQSLLAFAEQRXSKKDEHAELIVLRRGDYDAXTHQVQWQAQEVVAQARLDGHRSMNPCPLYDXQTGTLFLFFIAIPGQVTEQQQLQTRANVTRLCXVTSTDHGRTWSSPRDLTDAAIGPAYREWSTFAVGPGHCLQLHDRARSLVVPAYAYRKLHPXQRPIPSAFCFLSHDHGRTWARGHFVAQDTLECQVAEVETGEQRVVTLNARSHLRXRVQAQSTNDGLDFQESQLVKKLVEPPPXGCQGSVISFPSPRSGPGSPAQWLLYTHPTHXXQRADLGAYLNPRPPAPEAWSEPVLLAKGSXAYSDLQSMGTGPDGSPLFGCLYEANDYEEIXFXMFTLKQAFPAEYLPQXXXXXXXXXXDKTHTCPPCPAPELLGGPSVFLFPPKPKDTLMISRTPEVTCVVVDVSHEDPEVKFNWYVDGVEVHNAKTKPREEQYNSTYRVVSVLTVLHQDWLNGKEYKCKVSNKALPAPIEKTISKAKGQPREPQVYTLPPSREEMTKNQVSLTCLVKGFYPSDIAVEWESNGQPENNYKTTPPVLDSDGSFFLYSKLTVDKSRWQQGNVFSCSVMHEALHNHYTQKSLSLSPGKGGGGSGGGGSGGGGSEVQLVESGGGLVQPGGSLRLSCAASGFNIKDTYIHWVRQAPGKGLEWVARIYPTNGYTRYADSVKGRFTISADTSKNTAYLQMNSLRAEDTAVYYCSRWGGDGFYAMDYWGQGTLVTVSSGGGGSGGGGSGGGGSDIQMTQSPSSLSASVGDRVTITCRASQDVNTAVAWYQQKPGKAPKLLIYSASFLYSGVPSRFSGSRSGTDFTLTISSLQPEDFATYYCQQHYTTPPTFGQGTKVEIK

SEQ ID NO: 248 - protein, 874 aa, Artificial Sequence
  Description of Artificial Sequence: Synthetic polypeptide
  MOD_RES (1)..(1): Ala, Arg, Asn, Asp, Gln, Glu, Gly, His, Leu, Lys, Met, Phe, Thr, Val, or not present
  MOD_RES (2)..(2): Ala or Lys
  MOD_RES (4)..(4): Asn or Leu
  MOD_RES (5)..(5): Pro or His
  MOD_RES (6)..(6): Phe, Trp, Tyr or Val
  MOD_RES (9)..(9): Lys or Asp
  MOD_RES (42)..(42): Ala or Arg
  MOD_RES (44)..(44): Lys, Arg, or Glu
  MOD_RES (45)..(45): Lys, Ala, Arg, or Glu
  MOD_RES (54)..(54): Leu or Met
  MOD_RES (62)..(62): Pro, Asn, Asp, His, Glu, Gly, Ser or Thr
  MOD_RES (69)..(69): Gln or His
  MOD_RES (78)..(78): Arg or Lys
  MOD_RES (80)..(80): Asp or Pro
  MOD_RES (93)..(93): Ala, Glu or Lys
  MOD_RES (107)..(107): Gly or Asp
  MOD_RES (108)..(108): Gln or His
  MOD_RES (112)..(112): Gln, Arg, or Lys
  MOD_RES (125)..(125): Ala, Cys, Ile, Ser, Val, or Leu
  MOD_RES (126)..(126): Gln, Leu, Glu, Phe, His, Ile, Leu, or Tyr
  MOD_RES (150)..(150): Ala or Val
  MOD_RES (164)..(164): Cys or Gly
  MOD_RES (170)..(170): Arg or Pro
  MOD_RES (171)..(171): Ala or Gly
  MOD_RES (187)..(187): Arg, Ile, or Lys
  MOD_RES (188)..(188): Gln or Pro
  MOD_RES (189)..(189): Arg or Pro
  MOD_RES (196)..(196): Ala, Cys, Leu, or Val
  MOD_RES (213)..(213): Ala, Cys, Asn, Ser, or Thr
  MOD_RES (217)..(217): Leu, Ala, or Val
  MOD_RES (225)..(225): Glu or Pro
  MOD_RES (239)..(239): His or Pro
  MOD_RES (240)..(240): Leu, Asp, Asn, or Tyr
  MOD_RES (241)..(241): Arg, Ala, Asp, Leu, Gln, or Tyr
  MOD_RES (242)..(242): Ala, Cys, Phe, Gly, His, Ile, Lys, Leu, Met, Asn, Gln, Arg, Ser, Val, Trp, or Tyr
  MOD_RES (244)..(244): Val, Ile, or Lys
  MOD_RES (249)..(249): Thr or Ala
  MOD_RES (251)..(251): Asp or Gly
  MOD_RES (257)..(257): Glu, Lys, or Pro
  MOD_RES (258)..(258): Ser or Cys
  MOD_RES (260)..(260): Leu, Asp, Phe, Gln, or Thr
  MOD_RES (265)..(265): Val or Phe
  MOD_RES (270)..(270): Gln, Ala, His, Phe, Pro, Ser, or Thr
  MOD_RES (272)..(272): Cys or Val
  MOD_RES (292)..(292): Trp or Arg
  MOD_RES (301)..(301): Ser, Arg, Ala, Asp, Glu, Phe, Gly, His, Ile, Lys, Leu, Met, Asn, Pro, Gln, Thr, Val, Trp, or Tyr
  MOD_RES (302)..(302): Trp, Lys, Ala, Asp, Glu, Phe, Gly, His, Ile, Lys, Leu, Met, Asn, Pro, Gln, Arg, Ser, Thr, Val, or Tyr
  MOD_RES (325)..(325): Lys or Val
  MOD_RES (332)..(332): Ala, Cys, Ser, or Val
  MOD_RES (352)..(352): Cys, Leu, or Val
  MOD_RES (363)..(363): Val or Arg
  MOD_RES (365)..(365): Leu, Gln, His, Ile, Lys, or Ser
  MOD_RES (381)..(390): This region may encompass one of the following sequences: "GGGGS" or "GGGGSGGGGS" or "EPKSS"
XXSXXXLQXESVFQSGAHAYRIPALLYLPGQQSLLAFAEQRXSXXDEHAELIVXRRGDYDAXTHQVQWXAQEVVAQAXLXGHRSMNPCPLYDXQTGTLFLFFIAIPXXVTEXQQLQTRANVTRLXXVTSTDHGRTWSSPRDLTDAAIGPXYREWSTFAVGPGHXLQLHDXXRSLVVPAYAYRKLHPXXXPIPSAFXFLSHDHGRTWARGHFVXQDTXECQVAEVXTGEQRVVTLNARSXXXXRXQAQSXNXGLDFQXXQXVKKLXEPPPXGXQGSVISFPSPRSGPGSPAQXLLYTHPTHXXQRADLGAYLNPRPPAPEAWSEPXLLAKGSXAYSDLQSMGTGPDGSPLFGXLYEANDYEEIXFXMFTLKQAFPAEYLPQXXXXXXXXXXDKTHTCPPCPAPELLGGPSVFLFPPKPKDTLMISRTPEVTCVVVDVSHEDPEVKFNWYVDGVEVHNAKTKPREEQYNSTYRVVSVLTVLHQDWLNGKEYKCKVSNKALPAPIEKTISKAKGQPREPQVYTLPPSREEMTKNQVSLTCLVKGFYPSDIAVEWESNGQPENNYKTTPPVLDSDGSFFLYSKLTVDKSRWQQGNVFSCSVMHEALHNHYTQKSLSLSPGKGGGGSGGGGSGGGGSEVQLVESGGGLVQPGGSLRLSCAASGFNIKDTYIHWVRQAPGKGLEWVARIYPTNGYTRYADSVKGRFTISADTSKNTAYLQMNSLRAEDTAVYYCSRWGGDGFYAMDYWGQGTLVTVSSGGGGSGGGGSGGGGSDIQMTQSPSSLSASVGDRVTITCRASQDVNTAVAWYQQKPGKAPKLLIYSASFLYSGVPSRFSGSRSGTDFTLTISSLQPEDFATYYCQQHYTTPPTFGQGTKVEIK

SEQ ID NO: 249 - protein, 869 aa, Artificial Sequence
  Description of Artificial Sequence: Synthetic polypeptide
DASLPYLQKESVFQSGAHAYRIPALLYLPGQQSLLAFAEQRRSKKDEHAELIVLRRGDYDAGTHQVQWQAQEVVAQARLDGHRSMNPCPLYDEQTGTLFLFFIAIPGQVTEQQQLQTRANVTRLCYVTSTDHGRTWSSPRDLTDAAIGPAYREWSTFAVGPGHCLQLHDRARSLVVPAYAYRKLHPKQRPIPSAFCFLSHDHGRTWARGHFVAQDTLECQVAEVETGEQRVVTLNARSHLRFRVQAQSTNDGLDFQESQLVKKLVEPPPTGCQGSVISFPSPRSGPGSPAQWLLYTHPTHSWQRADLGAYLNPRPPAPEAWSEPVLLAKGSAAYSDLQSMGTGPDGSPLFGCLYEANDYEEIVFLMFTLKQAFPAEYLPQEPKSSDKTHTCPPCPAPELLGGPSVFLFPPKPKDTLMISRTPEVTCVVVDVSHEDPEVKFNWYVDGVEVHNAKTKPREEQYNSTYRVVSVLTVLHQDWLNGKEYKCKVSNKALPAPIEKTISKAKGQPREPQVYTLPPSREEMTKNQVSLTCLVKGFYPSDIAVEWESNGQPENNYKTTPPVLDSDGSFFLYSKLTVDKSRWQQGNVFSCSVMHEALHNHYTQKSLSLSPGKGGGGSGGGGSGGGGSEVQLVESGGGLVQPGGSLRLSCAASGFNIKDTYIHWVRQAPGKGLEWVARIYPTNGYTRYADSVKGRFTISADTSKNTAYLQMNSLRAEDTAVYYCSRWGGDGFYAMDYWGQGTLVTVSSGGGGSGGGGSGGGGSDIQMTQSPSSLSASVGDRVTITCRASQDVNTAVAWYQQKPGKAPKLLIYSASFLYSGVPSRFSGSRSGTDFTLTISSLQPEDFATYYCQQHYTTPPTFGQGTKVEIK

SEQ ID NO: 250 - protein, 10 aa, Artificial Sequence
  Description of Artificial Sequence: Synthetic 10xHis tag
HHHHHHHHHH

SEQ ID NO: 251 - protein, 15 aa, Artificial Sequence
  Description of Artificial Sequence: Synthetic peptide
  SITE (1)..(15): This sequence may encompass 1-5 "Gly Gly Pro" repeating units
GGPGGPGGPGGPGGP

SEQ ID NO: 252 - protein, 25 aa, Artificial Sequence
  Description of Artificial Sequence: Synthetic peptide
  SITE (1)..(25): This sequence may encompass 1-5 "Gly Gly Gly Gly Ser" repeating units
GGGGSGGGGSGGGGSGGGGSGGGGS

SEQ ID NO: 253 - protein, 6 aa, Artificial Sequence
  Description of Artificial Sequence: Synthetic 6xHis tag
HHHHHH

SEQ ID NO: 254 - protein, 5 aa, Homo sapiens
LHPIQ

SEQ ID NO: 255 - protein, 10 aa, Homo sapiens
TFAVGPGHCL

SEQ ID NO: 256 - protein, 7 aa, Petromyzon marinus
CHCRIVM

SEQ ID NO: 257 - protein, 7 aa, Carlito syrichta
LRARVQA

SEQ ID NO: 258 - protein, 7 aa, Saccoglossus kowalevskii
CRCRIIA

SEQ ID NO: 259 - protein, 7 aa, Lygus hesperus
HPTHQGV

SEQ ID NO: 260 - protein, 7 aa, Rattus norvegicus
IGARVQA

SEQ ID NO: 261 - protein, 7 aa, Branchiostoma floridae
CHCKAFL

SEQ ID NO: 262 - protein, 7 aa, Alces americanus
LGARVQA

SEQ ID NO: 263 - protein, 7 aa, Pan troglodytes
LQARVQA

SEQ ID NO: 264 - protein, 7 aa, Xenopus tropicalis
KHFRVEA

SEQ ID NO: 265 - protein, 7 aa, Gallus gallus
RGARIQA

SEQ ID NO: 266 - protein, 7 aa, Anolis carolinensis
DKSRAEA

SEQ ID NO: 267 - protein, 7 aa, Ornithorhynchus anatinus
RGSRVQA

SEQ ID NO: 268 - protein, 7 aa, Branchiostoma floridae
CSCKAFM

SEQ ID NO: 269 - protein, 7 aa, Strongylocentrotus purpuratus
CHCRLQS

SEQ ID NO: 270 - protein, 7 aa, Strongylocentrotus purpuratus
CNCRIQA

SEQ ID NO: 271 - protein, 7 aa, Otolemur garnettii
LRARVQA

SEQ ID NO: 272 - protein, 7 aa, Alligator sinensis
RGARVQA

SEQ ID NO: 273 - protein, 7 aa, Chlorocebus sabaeus
LRARIQA

SEQ ID NO: 274 - protein, 7 aa, Anas platyrhynchos platyrhynchos
KGARIQA

SEQ ID NO: 275 - protein, 7 aa, Latimeria chalumnae
LGSRVQA

SEQ ID NO: 276 - protein, 7 aa, Cricetulus griseus
LGARVQA

SEQ ID NO: 277 - protein, 7 aa, Latimeria chalumnae
LGSRVQA

SEQ ID NO: 278 - protein, 7 aa, Lonchura striata domestica
RGARIQA

SEQ ID NO: 279 - protein, 7 aa, Callithrix jacchus
LRARVQA

SEQ ID NO: 280 - protein, 7 aa, Ovis aries
HQARVQA

SEQ ID NO: 281 - protein, 7 aa, Ophiophagus hannah
DRYRVEA

SEQ ID NO: 282 - protein, 7 aa, Equus caballus
LRARVQA

SEQ ID NO: 283 - protein, 7 aa, Homo sapiens
LRARVQA

SEQ ID NO: 284 - protein, 7 aa, Xenopus tropicalis
CGKRIEA

SEQ ID NO: 285 - protein, 7 aa, Branchiostoma floridae
HARRQQS

SEQ ID NO: 286 - protein, 6 aa, Karenia brevis
FFRTRT

SEQ ID NO: 287 - protein, 7 aa, Patagioenas fasciata monilis
RGARIQA

SEQ ID NO: 288 - protein, 7 aa, Saccoglossus kowalevskii
CKCRIFS

SEQ ID NO: 289 - protein, 7 aa, Petromyzon marinus
CRCRIVI

SEQ ID NO: 290 - protein, 7 aa, Anolis carolinensis
EQCRAEA

SEQ ID NO: 291 - protein, 7 aa, Saccoglossus kowalevskii
CSCRIIT

SEQ ID NO: 292 - protein, 7 aa, Petromyzon marinus
HEFRVQA

SEQ ID NO: 293 - protein, 7 aa, Patagioenas fasciata monilis
RGARIQA

SEQ ID NO: 294 - protein, 7 aa, Branchiostoma floridae
CNCKMIM

SEQ ID NO: 295 - protein, 7 aa, Papio anubis
LRARIQA

SEQ ID NO: 296 - protein, 7 aa, Sarcophilus harrisii
LGRRVQA

SEQ ID NO: 297 - protein, 7 aa, Monodelphis domestica
HKLRVQA

SEQ ID NO: 298 - protein, 7 aa, Papio anubis
LRARIQA

SEQ ID NO: 299 - protein, 7 aa, Ailuropoda melanoleuca
LRARVQA

SEQ ID NO: 300 - protein, 7 aa, Anolis carolinensis
DRYRAEA

SEQ ID NO: 301 - protein, 7 aa, Mesocricetus auratus
LGARVQA

SEQ ID NO: 302 - protein, 7 aa, Alligator mississippiensis
RGARVQA

SEQ ID NO: 303 - protein, 7 aa, Mustela putorius furo
LGARVQA

SEQ ID NO: 304 - protein, 7 aa, Castor fiber
LGARVQA

SEQ ID NO: 305 - protein, 7 aa, Strongylocentrotus purpuratus
QATRQES

SEQ ID NO: 306 - protein, 7 aa, Paracentrotus lividus
KKPHPRS

SEQ ID NO: 307 - protein, 7 aa, Ictidomys tridecemlineatus
RGARVQA

SEQ ID NO: 308 - protein, 7 aa, Meleagris gallopavo
KGARIQA

SEQ ID NO: 309 - protein, 7 aa, Cavia porcellus
QKARVQA

SEQ ID NO: 310 - protein, 7 aa, Sus scrofa
LQARVQA

SEQ ID NO: 311 - protein, 7 aa, Canis lupus familiaris
RRARVQA

SEQ ID NO: 312 - protein, 7 aa, Strongylocentrotus purpuratus
CSCRIQA

SEQ ID NO: 313 - protein, 7 aa, Felis catus
LRARVQA

SEQ ID NO: 314 - protein, 7 aa, Taeniopygia guttata
RGCRAVA

SEQ ID NO: 315 - protein, 7 aa, Taeniopygia guttata
RGARIQA

SEQ ID NO: 316 - protein, 7 aa, Erinaceus europaeus
WGARIQA

SEQ ID NO: 317 - protein, 7 aa, Mus musculus
LGARVQA

SEQ ID NO: 318 - protein, 7 aa, Mus musculus
LGARVQA

SEQ ID NO: 319 - protein, 7 aa, Mus musculus
LGARVQA

SEQ ID NO: 320 - protein, 7 aa, Mus musculus
LGARVQA

SEQ ID NO: 321 - protein, 7 aa, Xenopus tropicalis
GKKRIEA

SEQ ID NO: 322 - protein, 7 aa, Nomascus leucogenys
LRARVQA

SEQ ID NO: 323 - protein, 7 aa, Strongylocentrotus purpuratus
QQTRAAI

SEQ ID NO: 324 - protein, 7 aa, Macaca mulatta
LRARIQA

SEQ ID NO: 325 - protein, 7 aa, Oryctolagus cuniculus
QGSRVQA

SEQ ID NO: 326 - protein, 7 aa, Gallus gallus
LGFRVQA

SEQ ID NO: 327 - protein, 7 aa, Anolis carolinensis
HKYRAGA

SEQ ID NO: 328 - protein, 7 aa, Rattus norvegicus
IGARVQA

SEQ ID NO: 329 - protein, 7 aa, Ictidomys tridecemlineatus
RGARVQA

SEQ ID NO: 330 - protein, 7 aa, Dipodomys ordii
RGARVQA

SEQ ID NO: 331 - protein, 7 aa, Bos taurus
LRARVQA

SEQ ID NO: 332 - protein, 5 aa, Karenia brevis
GRGVA

SEQ ID NO: 333 - protein, 7 aa, Anolis carolinensis
CSCRIVI

SEQ ID NO: 334 - protein, 7 aa, Myotis lucifugus
RGARIQA

SEQ ID NO: 335 - protein, 7 aa, Gorilla gorilla gorilla
LRARVQA

SEQ ID NO: 336 - protein, 7 aa, Ficedula albicollis
RGARIQA

SEQ ID NO: 337 - protein, 7 aa, Loxodonta africana
RRARVQA

SEQ ID NO: 338 - protein, 7 aa, Mus musculus
LGARVQA

SEQ ID NO: 339 - protein, 6 aa, Homo sapiens
LRARVQ

SEQ ID NO: 340 - protein, 6 aa, Homo sapiens
LRCRVQ

SEQ ID NO: 341 - protein, 6 aa, Homo sapiens
LRAKVQ

SEQ ID NO: 342 - protein, 6 aa, Homo sapiens
LRARIQ

SEQ ID NO: 343 - protein, 6 aa, Homo sapiens
LRARPQ

SEQ ID NO: 344 - protein, 6 aa, Homo sapiens
LRCRKQ

SEQ ID NO: 345 - protein, 6 aa, Homo sapiens
LRRRRQ

SEQ ID NO: 346 - protein, 6 aa, Homo sapiens
LRRRHQ

SEQ ID NO: 347 - protein, 6 aa, Homo sapiens
LRTRPQ

SEQ ID NO: 348 - protein, 6 aa, Homo sapiens
LRYRPQ

SEQ ID NO: 349 - protein, 6 aa, Homo sapiens
LRNRPQ

What is claimed is:

1. A recombinant mutant sialidase enzyme (e.g., human sialidase enzyme), wherein the sialidase comprises a mutation that increases resistance to cleavage by a protease.

2. The enzyme of claim 1, wherein incubation of the sialidase with the protease results in less than 50% (e.g., less than 40%, less than 30%, less than 10%, less than 5%, less than 3%, less than 1%, or less than 0.5%) of the proteolytic cleavage of a corresponding wild-type sialidase when incubated with the protease under the same conditions.

3. The enzyme of claim 1 or claim 2, wherein the protease is trypsin.

4. The enzyme of any one of claims 1-3, wherein the sialidase comprises:
(a) a substitution of an alanine residue at a position corresponding to position 213 of wild-type human Neu2 (A213);
(b) a substitution of a leucine residue at a position corresponding to position 240 of wild-type human Neu2 (L240);
(c) a substitution of an arginine residue at a position corresponding to position 241 of wild-type human Neu2 (R241);
(d) a substitution of an alanine residue at a position corresponding to position 242 of wild-type human Neu2 (A242);
(e) a substitution of an arginine residue at a position corresponding to position 243 of wild-type human Neu2 (R243);
(f) a substitution of a valine residue at a position corresponding to position 244 of wild-type human Neu2 (V244);
(g) a substitution of a serine residue at a position corresponding to position 258 of wild-type human Neu2 (S258);
(h) a substitution of a leucine residue at a position corresponding to position 260 of wild-type human Neu2 (L260);
(i) a substitution of a valine residue at a position corresponding to position 265 of wild-type human Neu2 (V265);
or a combination of any of the foregoing substitutions.

5. The enzyme of claim 4, wherein, in the sialidase:
(a) the alanine residue at a position corresponding to position 213 of wild-type human Neu2 is substituted by cysteine (A213C), asparagine (A213N), serine (A213S), or threonine (A213T);
(b) the leucine residue at a position corresponding to position 240 of wild-type human Neu2 (L240) is substituted by aspartic acid (L240D), asparagine (L240N), or tyrosine (L240Y);
(c) the arginine residue at a position corresponding to position 241 of wild-type human Neu2 (R241) is substituted by alanine (R241A), aspartic acid (R241D), leucine (R241L), glutamine (R241Q). or tyrosine (R241Y);
(d) the alanine residue at a position corresponding to position 242 of wild-type human Neu2 (A242) is substituted by cysteine (A242C), phenylalanine (A242F), glycine (A242G), histidine (A242H), isoleucine (A242I), lysine (A242K), leucine (A242L), methionine (A242M), asparagine (A242N), glutamine (A242Q), arginine (A242R), serine (A242S), valine (A242V), tryptophan (A242W), or tyrosine (A242Y);
(e) the valine residue at a position corresponding to position 244 of wild-type human Neu2 (V244) is substituted by isoleucine (V244I), lysine (V244K), or proline (V244P);
(f) the serine residue at a position corresponding to position 258 of wild-type human Neu2 (S258) is substituted by cysteine (S258C);
(g) the leucine residue at a position corresponding to position 260 of wild-type human Neu2 (L260) is substituted by aspartic acid (L260D), phenylalanine (L260F), glutamine (L260Q), or threonine (L260T);
(h) the valine residue at a position corresponding to position 265 of wild-type human Neu2 (V265) is substituted by phenylalanine (V265F);
or a combination of any of the foregoing substitutions.

6. The enzyme of claim 5, wherein, the sialidase comprises a combination of substitutions as set forth in TABLE 2.

7. A recombinant mutant human sialidase enzyme, wherein the sialidase comprises:
(a) a substitution of a proline residue at a position corresponding to position 5 of wild-type human Neu2 (P5);
(b) a substitution of a lysine residue at a position corresponding to position 9 of wild-type human Neu2 (K9);
(c) a substitution of an alanine residue at a position corresponding to position 42 of wild-type human Neu2 (A42);
(d) a substitution of a lysine residue at a position corresponding to position 44 of wild-type human Neu2 (K44);
(e) a substitution of a lysine residue at a position corresponding to position 45 of wild-type human Neu2 (K45);
(f) a substitution of a leucine residue at a position corresponding to position 54 of wild-type human Neu2 (L54);
(g) a substitution of a proline residue at a position corresponding to position 62 of wild-type human Neu2 (P62);
(h) a substitution of a glutamine residue at a position corresponding to position 69 of wild-type human Neu2 (Q69);
(i) a substitution of an arginine residue at a position corresponding to position 78 of wild-type human Neu2 (R78);
(j) a substitution of an aspartic acid residue at a position corresponding to position 80 of wild-type human Neu2 (D80);
(k) a substitution of an alanine residue at a position corresponding to position 93 of wild-type human Neu2 (A93);
(l) a substitution of a glycine residue at a position corresponding to position 107 of wild-type human Neu2 (G107);
(m) a substitution of a glutamine residue at a position corresponding to position 108 of wild-type human Neu2 (Q108);
(n) a substitution of a glutamine residue at a position corresponding to position 112 of wild-type human Neu2 (Q112);
(o) a substitution of a cysteine residue at a position corresponding to position 125 of wild-type human Neu2 (C125);
(p) a substitution of a glutamine residue at a position corresponding to position 126 of wild-type human Neu2 (Q126);
(q) a substitution of an alanine residue at a position corresponding to position 150 of wild-type human Neu2 (A150);
(r) a substitution of a cysteine residue at a position corresponding to position 164 of wild-type human Neu2 (C164);
(s) a substitution of an arginine residue at a position corresponding to position 170 of wild-type human Neu2 (R170);
(t) a substitution of an alanine residue at a position corresponding to position 171 of wild-type human Neu2 (A171);
(u) a substitution of a glutamine residue at a position corresponding to position 188 of wild-type human Neu2 (Q188);
(v) a substitution of an arginine residue at a position corresponding to position 189 of wild-type human Neu2 (R189);
(w) a substitution of an alanine residue at a position corresponding to position 213 of wild-type human Neu2 (A213);
(x) a substitution of a leucine residue at a position corresponding to position 217 of wild-type human Neu2 (L217);
(y) a substitution of a glutamic acid residue at a position corresponding to position 225 of wild-type human Neu2 (E225);
(z) a substitution of a histidine residue at a position corresponding to position 239 of wild-type human Neu2 (H239);
(aa) a substitution of a leucine residue at a position corresponding to position 240 of wild-type human Neu2 (L240);
(bb) a substitution of an arginine residue at a position corresponding to position 241 of wild-type human Neu2 (R241);
(cc) a substitution of an alanine residue at a position corresponding to position 242 of wild-type human Neu2 (A242);
(dd) a substitution of a valine residue at a position corresponding to position 244 of wild-type human Neu2 (V244);
(ee) a substitution of a threonine residue at a position corresponding to position 249 of wild-type human Neu2 (T249);
(ff) a substitution of an aspartic acid residue at a position corresponding to position 251 of wild-type human Neu2 (D251);
(gg) a substitution of a glutamic acid residue at a position corresponding to position 257 of wild-type human Neu2 (E257);
(hh) a substitution of a serine residue at a position corresponding to position 258 of wild-type human Neu2 (S258);
(ii) a substitution of a leucine residue at a position corresponding to position 260 of wild-type human Neu2 (L260);
(jj) a substitution of a valine residue at a position corresponding to position 265 of wild-type human Neu2 (V265);
(kk) a substitution of a glutamine residue at a position corresponding to position 270 of wild-type human Neu2 (Q270);
(ll) a substitution of a tryptophan residue at a position corresponding to position 292 of wild-type human Neu2 (W292);
(mm) a substitution of a serine residue at a position corresponding to position 301 of wild-type human Neu2 (S301);
(nn) a substitution of a tryptophan residue at a position corresponding to position 302 of wild-type human Neu2 (W302);
(oo) a substitution of a valine residue at a position corresponding to position 363 of wild-type human Neu2 (V363); or
(pp) a substitution of a leucine residue at a position corresponding to position 365 of wild-type human Neu2 (L365);
or a combination of any of the foregoing substitutions.

8. A recombinant mutant human sialidase enzyme, wherein the sialidase comprises:
(a) a substitution of a proline residue at a position corresponding to position 5 of wild-type human Neu2 (P5);
(b) a substitution of a lysine residue at a position corresponding to position 9 of wild-type human Neu2 (K9);
(c) a substitution of a lysine residue at a position corresponding to position 44 of wild-type human Neu2 (K44);
(d) a substitution of a lysine residue at a position corresponding to position 45 of wild-type human Neu2 (K45);
(e) a substitution of a leucine residue at a position corresponding to position 54 of wild-type human Neu2 (L54);
(f) a substitution of a proline residue at a position corresponding to position 62 of wild-type human Neu2 (P62);
(g) a substitution of a glutamine residue at a position corresponding to position 69 of wild-type human Neu2 (Q69);
(h) a substitution of an arginine residue at a position corresponding to position 78 of wild-type human Neu2 (R78);
(i) a substitution of an aspartic acid residue at a position corresponding to position 80 of wild-type human Neu2 (D80);
(j) a substitution of an alanine residue at a position corresponding to position 93 of wild-type human Neu2 (A93);
(k) a substitution of a glycine residue at a position corresponding to position 107 of wild-type human Neu2 (G107);
(l) a substitution of a glutamine residue at a position corresponding to position 108 of wild-type human Neu2 (Q108);
(m) a substitution of a glutamine residue at a position corresponding to position 112 of wild-type human Neu2 (Q112);
(n) a substitution of a cysteine residue at a position corresponding to position 125 of wild-type human Neu2 (C125);
(o) a substitution of a glutamine residue at a position corresponding to position 126 of wild-type human Neu2 (Q126);
(p) a substitution of an alanine residue at a position corresponding to position 150 of wild-type human Neu2 (A150);
(q) a substitution of a cysteine residue at a position corresponding to position 164 of wild-type human Neu2 (C164);
(r) a substitution of an arginine residue at a position corresponding to position 170 of wild-type human Neu2 (R170);
(s) a substitution of an alanine residue at a position corresponding to position 171 of wild-type human Neu2 (A171);
(t) a substitution of a glutamine residue at a position corresponding to position 188 of wild-type human Neu2 (Q188);
(u) a substitution of an arginine residue at a position corresponding to position 189 of wild-type human Neu2 (R189);
(v) a substitution of an alanine residue at a position corresponding to position 213 of wild-type human Neu2 (A213);
(w) a substitution of a leucine residue at a position corresponding to position 217 of wild-type human Neu2 (L217);
(x) a substitution of a glutamic acid residue at a position corresponding to position 225 of wild-type human Neu2 (E225);
(y) a substitution of a histidine residue at a position corresponding to position 239 of wild-type human Neu2 (H239);
(z) a substitution of a leucine residue at a position corresponding to position 240 of wild-type human Neu2 (L240);
(aa) a substitution of an arginine residue at a position corresponding to position 241 of wild-type human Neu2 (R241);
(bb) a substitution of an alanine residue at a position corresponding to position 242 of wild-type human Neu2 (A242);
(cc) a substitution of a valine residue at a position corresponding to position 244 of wild-type human Neu2 (V244);
(dd) a substitution of a threonine residue at a position corresponding to position 249 of wild-type human Neu2 (T249);
(ee) a substitution of an aspartic acid residue at a position corresponding to position 251 of wild-type human Neu2 (D251);
(ff) a substitution of a glutamic acid residue at a position corresponding to position 257 of wild-type human Neu2 (E257);
(gg) a substitution of a serine residue at a position corresponding to position 258 of wild-type human Neu2 (S258);
(hh) a substitution of a leucine residue at a position corresponding to position 260 of wild-type human Neu2 (L260);
(ii) a substitution of a valine residue at a position corresponding to position 265 of wild-type human Neu2 (V265);
(jj) a substitution of a glutamine residue at a position corresponding to position 270 of wild-type human Neu2 (Q270);
(kk) a substitution of a tryptophan residue at a position corresponding to position 292 of wild-type human Neu2 (W292);
(ll) a substitution of a serine residue at a position corresponding to position 301 of wild-type human Neu2 (S301);
(mm) a substitution of a tryptophan residue at a position corresponding to position 302 of wild-type human Neu2 (W302);
(nn) a substitution of a valine residue at a position corresponding to position 363 of wild-type human Neu2 (V363); or
(oo) a substitution of a leucine residue at a position corresponding to position 365 of wild-type human Neu2 (L365);
or a combination of any of the foregoing substitutions.

9. The enzyme of claim 7 or 8, wherein the sialidase comprises a substitution of K9, A42, P62, A93, Q126, A242, Q270, S301, W302, V363, or L365, or a combination of any of the foregoing substitutions.

10. The enzyme of claim 7 or 8, wherein the sialidase comprises a substitution of K9, P62, A93, Q126, A242, Q270, S301, W302, V363, or L365, or a combination of any of the foregoing substitutions.

11. The enzyme of any one of claims 7-10, wherein, in the sialidase:
(a) the proline residue at a position corresponding to position 5 of wild-type human Neu2 is substituted by histidine (P5H);
(b) the lysine residue at a position corresponding to position 9 of wild-type human Neu2 is substituted by aspartic acid (K9D);
(c) the alanine residue at a position corresponding to position 42 of wild-type human Neu2 is substituted by arginine (A42R);
(d) the lysine residue at a position corresponding to position 44 of wild-type human Neu2 is substituted by arginine (K44R) or glutamic acid (K44E);
(e) the lysine residue at a position corresponding to position 45 of wild-type human Neu2 is substituted by alanine (K45A), arginine (K45R), or glutamic acid (K45E);
(f) the leucine residue at a position corresponding to position 54 of wild-type human Neu2 is substituted by methionine (L54M);
(g) the proline residue at a position corresponding to position 62 of wild-type human Neu2 is substituted by asparagine (P62N), aspartic acid (P62D), histidine (P62H), glutamic acid (P62E), glycine (P62G), serine (P62S), or threonine (P62T);
(h) the glutamine residue at a position corresponding to position 69 of wild-type human Neu2 is substituted by histidine (Q69H);
(i) the arginine residue at a position corresponding to position 78 of wild-type human Neu2 is substituted by lysine (R78K);
(j) the aspartic acid residue at a position corresponding to position 80 of wild-type human Neu2 is substituted by proline (D80P);
(k) the alanine residue at a position corresponding to position 93 of wild-type human Neu2 is substituted by glutamic acid (A93E) or lysine (A93K);
(l) the glycine residue at a position corresponding to position 107 of wild-type human Neu2 is substituted by aspartic acid (G107D);
(m) the glutamine residue at a position corresponding to position 108 of wild-type human Neu2 is substituted by histidine (Q108H);
(n) the glutamine residue at a position corresponding to position 112 of wild-type human Neu2 is substituted by arginine (Q112R) or lysine (Q112K);
(o) the cysteine residue at a position corresponding to position 125 of wild-type human Neu2 is substituted by leucine (C125L);
(p) the glutamine residue at a position corresponding to position 126 of wild-type human Neu2 is substituted by leucine (Q126L), glutamic acid (Q126E), phenylalanine (Q126F), histidine (Q126H), isoleucine (Q126I), or tyrosine (Q126Y);
(q) the alanine residue at a position corresponding to position 150 of wild-type human Neu2 is substituted by valine (A150V);
(r) the cysteine residue at a position corresponding to position 164 of wild-type human Neu2 is substituted by glycine (C164G);
(s) the arginine residue at a position corresponding to position 170 of wild-type human Neu2 is substituted by proline (R170P);
(t) the alanine residue at a position corresponding to position 171 of wild-type human Neu2 is substituted by glycine (A171G);
(u) the glutamine residue at a position corresponding to position 188 of wild-type human Neu2 is substituted by proline (Q188P);
(v) the arginine residue at a position corresponding to position 189 of wild-type human Neu2 is substituted by proline (R189P);
(w) the alanine residue at a position corresponding to position 213 of wild-type human Neu2 is substituted by cysteine (A213C), asparagine (A213N), serine (A213S) or threonine (A213 T);
(x) the leucine residue at a position corresponding to position 217 of wild-type human Neu2 is substituted by alanine (L217A) or valine (L217V);
(y) the glutamic acid residue at a position corresponding to position 225 of wild-type human Neu2 is substituted by proline (E225P);
(z) the histidine residue at a position corresponding to position 239 of wild-type human Neu2 is substituted by proline (H239P);
(aa) the leucine residue at a position corresponding to position 240 of wild-type human Neu2 is substituted by aspartic acid (L240D), asparagine (L240N), or tyrosine (L240Y);
(bb) the arginine residue at a position corresponding to position 241 of wild-type human Neu2 is substituted by alanine (R241A), aspartic acid (R241D), leucine (R241L), glutamine (R241Q). or tyrosine (R241Y);
(cc) the alanine residue at a position corresponding to position 242 of wild-type human Neu2 is substituted by cysteine (A242C), phenylalanine (A242F), glycine (A242G), histidine (A242H), isoleucine (A242I), lysine (A242K), leucine (A242L), methionine (A242M), asparagine (A242N), glutamine (A242Q), arginine (A242R), serine (A242S), valine (A242V), tryptophan (A242W), or tyrosine (A242Y);
(dd) the valine residue at a position corresponding to position 244 of wild-type human Neu2 is substituted by isoleucine (V244I) or proline (V244P);
(ee) the threonine residue at a position corresponding to position 249 of wild-type human Neu2 is substituted by alanine (T249A);
(ff) the aspartic acid residue at a position corresponding to position 251 of wild-type human Neu2 is substituted by glycine (D251G);
(gg) the glutamic acid residue at a position corresponding to position 257 of wild-type human Neu2 is substituted by proline (E257P);
(hh) the serine residue at a position corresponding to position 258 is substituted by cysteine (S258C);
(ii) the leucine residue at a position corresponding to position 260 of wild-type human Neu2 is substituted by aspartic acid (L260D), phenylalanine (L260F), glutamine (L260Q), or threonine (L260T);
(jj) the valine residue at a position corresponding to position 265 of wild-type human Neu2 is substituted by phenylalanine (V265F);
(kk) the glutamine residue at a position corresponding to position 270 of wild-type human Neu2 is substituted by alanine (Q270A), histidine (Q270H), phenylalanine (Q270F), proline (Q270P), serine (Q270S), or threonine (Q270T);
(ll) the tryptophan residue at a position corresponding to position 292 of wild-type human Neu2 is substituted by arginine (W292R);
(mm) the serine residue at a position corresponding to position 301 of wild-type human Neu2 is substituted by alanine (S301A), aspartic acid (S301D), glutamic acid (S301E), phenylalanine (S301F), histidine (S301H), lysine (S301K), leucine (S301L), methionine (S301M), asparagine (S301N), proline (S301P), glutamine (S301Q), arginine (S301R), threonine (S301T), valine (S301V), tryptophan (S301W), or tyrosine (S301Y);
(nn) the tryptophan residue at a position corresponding to position 302 of wild-type human Neu2 is substituted by alanine (W302A), aspartic acid (W302D), phenylalanine (W302F), glycine (W302G), histidine (W302H), isoleucine (W302I), lysine (W302K), leucine (W302L), methionine (W302M), asparagine (W302N), proline (W302P), glutamine (W302Q), arginine (W302R), serine (W302S), threonine (W302T), valine (W302V), or tyrosine (W302Y);
(oo) the valine residue at a position corresponding to position 363 of wild-type human Neu2 is substituted by arginine (V363R); or
(pp) the leucine residue at a position corresponding to position 365 of wild-type human Neu2 is substituted by glutamine (L365Q), histidine (L365H), isoleucine (L365I), lysine (L365K) or serine (L365S);
or the sialidase comprises a combination of any of the foregoing substitutions.

12. The enzyme of any one of claims 7-10, wherein, in the sialidase:
(a) the proline residue at a position corresponding to position 5 of wild-type human Neu2 is substituted by histidine (P5H);
(b) the lysine residue at a position corresponding to position 9 of wild-type human Neu2 is substituted by aspartic acid (K9D);
(c) the lysine residue at a position corresponding to position 44 of wild-type human Neu2 is substituted by arginine (K44R) or glutamic acid (K44E);
(d) the lysine residue at a position corresponding to position 45 of wild-type human Neu2 is substituted by alanine (K45A), arginine (K45R), or glutamic acid (K45E);
(e) the leucine residue at a position corresponding to position 54 of wild-type human Neu2 is substituted by methionine (L54M);
(f) the proline residue at a position corresponding to position 62 of wild-type human Neu2 is substituted by asparagine (P62N), aspartic acid (P62D), histidine (P62H), glutamic acid (P62E), glycine (P62G), serine (P62S), or threonine (P62T);
(g) the glutamine residue at a position corresponding to position 69 of wild-type human Neu2 is substituted by histidine (Q69H);
(h) the arginine residue at a position corresponding to position 78 of wild-type human Neu2 is substituted by lysine (R78K);
(i) the aspartic acid residue at a position corresponding to position 80 of wild-type human Neu2 is substituted by proline (D80P);
(j) the alanine residue at a position corresponding to position 93 of wild-type human Neu2 is substituted by glutamic acid (A93E) or lysine (A93K);
(k) the glycine residue at a position corresponding to position 107 of wild-type human Neu2 is substituted by aspartic acid (G107D);
(l) the glutamine residue at a position corresponding to position 108 of wild-type human Neu2 is substituted by histidine (Q108H);
(m) the glutamine residue at a position corresponding to position 112 of wild-type human Neu2 is substituted by arginine (Q112R) or lysine (Q112K);
(n) the cysteine residue at a position corresponding to position 125 of wild-type human Neu2 is substituted by leucine (C125L);
(o) the glutamine residue at a position corresponding to position 126 of wild-type human Neu2 is substituted by leucine (Q126L), glutamic acid (Q126E), phenylalanine (Q126F), histidine (Q126H), isoleucine (Q126I), or tyrosine (Q126Y);
(p) the alanine residue at a position corresponding to position 150 of wild-type human Neu2 is substituted by valine (A150V);
(q) the cysteine residue at a position corresponding to position 164 of wild-type human Neu2 is substituted by glycine (C164G);
(r) the arginine residue at a position corresponding to position 170 of wild-type human Neu2 is substituted by proline (R170P);
(s) the alanine residue at a position corresponding to position 171 of wild-type human Neu2 is substituted by glycine (A171G);
(t) the glutamine residue at a position corresponding to position 188 of wild-type human Neu2 is substituted by proline (Q188P);
(u) the arginine residue at a position corresponding to position 189 of wild-type human Neu2 is substituted by proline (R189P);
(v) the alanine residue at a position corresponding to position 213 of wild-type human Neu2 is substituted by cysteine (A213C), asparagine (A213N), serine (A213S) or threonine (A213 T);
(w) the leucine residue at a position corresponding to position 217 of wild-type human Neu2 is substituted by alanine (L217A) or valine (L217V);
(x) the glutamic acid residue at a position corresponding to position 225 of wild-type human Neu2 is substituted by proline (E225P);
(y) the histidine residue at a position corresponding to position 239 of wild-type human Neu2 is substituted by proline (H239P);
(z) the leucine residue at a position corresponding to position 240 of wild-type human Neu2 is substituted by aspartic acid (L240D), asparagine (L240N), or tyrosine (L240Y);
(aa) the arginine residue at a position corresponding to position 241 of wild-type human Neu2 is substituted by alanine (R241A), aspartic acid (R241D), leucine (R241L), glutamine (R241Q). or tyrosine (R241Y);
(bb) the alanine residue at a position corresponding to position 242 of wild-type human Neu2 is substituted by cysteine (A242C), phenylalanine (A242F), glycine (A242G), histidine (A242H), isoleucine (A242I), lysine (A242K), leucine (A242L), methionine (A242M), asparagine (A242N), glutamine (A242Q), arginine (A242R), serine (A242S), valine (A242V), tryptophan (A242W), or tyrosine (A242Y);
(cc) the valine residue at a position corresponding to position 244 of wild-type human Neu2 is substituted by isoleucine (V244I) or proline (V244P);
(dd) the threonine residue at a position corresponding to position 249 of wild-type human Neu2 is substituted by alanine (T249A);
(ee) the aspartic acid residue at a position corresponding to position 251 of wild-type human Neu2 is substituted by glycine (D251G);
(ff) the glutamic acid residue at a position corresponding to position 257 of wild-type human Neu2 is substituted by proline (E257P);
(gg) the serine residue at a position corresponding to position 258 is substituted by cysteine (S258C);
(hh) the leucine residue at a position corresponding to position 260 of wild-type human Neu2 is substituted by aspartic acid (L260D), phenylalanine (L260F), glutamine (L260Q), or threonine (L260T);
(ii) the valine residue at a position corresponding to position 265 of wild-type human Neu2 is substituted by phenylalanine (V265F);
(jj) the glutamine residue at a position corresponding to position 270 of wild-type human Neu2 is substituted by alanine (Q270A), histidine (Q270H), phenylalanine (Q270F), proline (Q270P), serine (Q270S), or threonine (Q270T);
(kk) the tryptophan residue at a position corresponding to position 292 of wild-type human Neu2 is substituted by arginine (W292R);
(ll) the serine residue at a position corresponding to position 301 of wild-type human Neu2 is substituted by alanine (S301A), aspartic acid (S301D), glutamic acid (S301E), phenylalanine (S301F), histidine (S301H), lysine (S301K), leucine (S301L), methionine (S301M), asparagine (S301N), proline (S301P), glutamine (S301Q), arginine (S301R), threonine (S301T), valine (S301V), tryptophan (S301W), or tyrosine (S301Y);
(mm) the tryptophan residue at a position corresponding to position 302 of wild-type human Neu2 is substituted by alanine (W302A), aspartic acid (W302D), phenylalanine (W302F), glycine (W302G), histidine (W302H), isoleucine (W302I), lysine (W302K), leucine (W302L), methionine (W302M), asparagine (W302N), proline (W302P), glutamine (W302Q), arginine (W302R), serine (W302S), threonine (W302T), valine (W302V), or tyrosine (W302Y);
(nn) the valine residue at a position corresponding to position 363 of wild-type human Neu2 is substituted by arginine (V363R); or
(oo) the leucine residue at a position corresponding to position 365 of wild-type human Neu2 is substituted by glutamine (L365Q), histidine (L365H), isoleucine (L365I), lysine (L365K) or serine (L365S);
or the sialidase comprises a combination of any of the foregoing substitutions.

13. The enzyme of claim 11 or 12, wherein the sialidase comprises a substitution selected from the K9D, A42R, P62G, P62N, P62S, P62T, A93E, Q126Y, A242F, A242W, A242Y, Q270A, Q270T, S301A, S301R, W302K, W302R, V363R, and L365I substitutions, or a combination of any of the foregoing substitutions.

14. The enzyme of claim 11 or 12, wherein the sialidase comprises a substitution selected from the K9D, P62G, P62N, P62S, P62T, A93E, Q126Y, A242F, A242W, A242Y, Q270A, Q270T, S301A, S301R, W302K, W302R, V363R, and L365I substitutions, or a combination of any of the foregoing substitutions.

15. The enzyme of any one of claims 1-14, wherein the sialidase further comprises:
(a) a substitution or deletion of a methionine residue at a position corresponding to position 1 of wild-type human Neu2 (M1);
(b) a substitution of a valine residue at a position corresponding to position 6 of wild-type human Neu2 (V6);
(c) a substitution of an isoleucine residue at a position corresponding to position 187 of wild-type human Neu2 (I187); or
(d) a substitution of a cysteine residue at a position corresponding to position 332 of wild-type human Neu2 (C332);
or a combination of any of the foregoing substitutions.

16. The enzyme of claim 15, wherein, in the sialidase:
(a) the methionine residue at a position corresponding to position 1 of wild-type human Neu2 is deleted (ΔM1), is substituted by alanine (M1A), or is substituted by aspartic acid (M1D);
(b) the valine residue at a position corresponding to position 6 of wild-type human Neu2 is substituted by tyrosine (V6Y);
(c) the isoleucine residue at a position corresponding to position 187 of wild-type human Neu2 is substituted by lysine (I187K); or
(d) the cysteine residue at a position corresponding to position 332 of wild-type human Neu2 is substituted by alanine (C332A);
or the sialidase comprises a combination of any of the foregoing substitutions.

17. The enzyme of claim 16, wherein the sialidase comprises:
(a) the M1D, V6Y, P62G, A93E, I187K, and C332A substitutions;
(b) the M1D, V6Y, K9D, A93E, I187K, C332A, V363R, and L365I substitutions;
(c) the M1D, V6Y, P62N, I187K, and C332A substitutions;
(d) the M1D, V6Y, I187K, Q270A, S301R, W302K, and C332A substitutions;
(e) the M1D, V6Y, P62S, I187K, Q270A, S301R, W302K, and C332A substitutions;
(f) the M1D, V6Y, P62T, I187K, Q270A, S301R, W302K, and C332A substitutions;
(g) the M1D, V6Y, P62N, I187K, Q270A, S301R, W302K, and C332A substitutions;
(h) the M1D, V6Y, P62G, A93E, I187K, S301A, W302R, and C332A substitutions;
(i) the M1D, V6Y, P62G, A93E, Q126Y, I187K, Q270T, and C332A substitutions;
(j) the M1D, V6Y, P62G, A93E, Q126Y, I187K, and C332A substitutions;
(k) the M1D, V6Y, P62G, A93E, Q126Y, I187K, A242F, Q270T, and C332A substitutions; or
(l) the M1D, V6Y, A42R, P62G, A93E, Q126Y, I187K, A242F, Q270T, and C332A substitutions.

18. The enzyme of claim 16, wherein the sialidase comprises:
(a) the M1D, V6Y, P62G, A93E, I187K, and C332A substitutions;
(b) the M1D, V6Y, K9D, A93E, I187K, C332A, V363R, and L365I substitutions;
(c) the M1D, V6Y, P62N, I187K, and C332A substitutions;
(d) the M1D, V6Y, I187K, Q270A, S301R, W302K, and C332A substitutions;
(e) the M1D, V6Y, P62S, I187K, Q270A, S301R, W302K, and C332A substitutions;
(f) the M1D, V6Y, P62T, I187K, Q270A, S301R, W302K, and C332A substitutions;
(g) the M1D, V6Y, P62N, I187K, Q270A, S301R, W302K, and C332A substitutions;
(h) the M1D, V6Y, P62G, A93E, I187K, S301A, W302R, and C332A substitutions;
(i) the M1D, V6Y, P62G, A93E, Q126Y, I187K, Q270T, and C332A substitutions; or
(j) the M1D, V6Y, P62G, A93E, Q126Y, I187K, A242F, Q270T, and C332A substitutions.

19. The enzyme of any one of claims 1-18, wherein the sialidase is selected from Neu1, Neu2, Neu3, and Neu4.

20. The enzyme of claim 19, wherein the sialidase is Neu2.

21. The enzyme of any one of claims 1-20, wherein the sialidase has a different substrate specificity than the corresponding wild-type sialidase.

22. The enzyme of claim 21, wherein the sialidase can cleave α2,3, α2,6, and/or α2,8 linkages.

23. The enzyme of claim 22, wherein the sialidase can cleave α2,3 and α2,8 linkages.

24. The enzyme of any one of claims 1-23, wherein the sialidase comprises any one of SEQ ID NOs: 48-54, 149, 154, 159, 191, or 198.

25. The enzyme of any one of claims 1-23, wherein the sialidase comprises any one of SEQ ID NOs: 48-54, 149, 154, or 159.

26. A recombinant mutant human sialidase comprising a mutation or combination of mutations set forth in any one of TABLES 1, 2, 7-9, 11-13, 15-30, 34, or 35, and optionally further comprising a mutation or combination of mutations set forth in any one of TABLES 3-6.

27. A fusion protein comprising:
(a) the recombinant enzyme of any one of claims 1-26; and
(b) an immunoglobulin Fc domain and/or an immunoglobulin antigen-binding domain;
wherein the enzyme and the immunoglobulin Fc domain and/or the immunoglobulin antigen-binding domain are linked by a peptide bond or an amino acid linker.

28. The fusion protein of claim 27, wherein the fusion protein comprises an immunoglobulin Fc domain.

29. The fusion protein of claim 28, wherein the immunoglobulin Fc domain is derived from a human IgG1, IgG2, IgG3, IgG4, IgA1, IgA2, IgD, IgE, or IgM Fc domain.

30. The fusion protein of claim 29, wherein the immunoglobulin Fc domain is derived from a human IgG1, IgG2, IgG3, or IgG4 Fc domain.

31. The fusion protein of claim 30, wherein the immunoglobulin Fc domain is derived from a human IgG1 Fc domain.

32. The fusion protein of any one of claims 27-31, wherein the fusion protein comprises an immunoglobulin antigen-binding domain.

33. The fusion protein of claim 32, wherein the immunoglobulin antigen-binding domain is associated with a second immunoglobulin antigen-binding domain to produce an antigen-binding site.

34. The fusion protein of claim 32 or 33, wherein the immunoglobulin antigen-binding domain is derived from an antibody selected from trastuzumab, daratumumab, girentuximab, ofatumumab, avelumab, and rituximab.

35. The fusion protein of any one of claims 27-34, wherein the fusion protein comprises any one of SEQ ID NOs: 203-210, 218, 220, 222, 224, 226, 228, 230, 232, 234, 236, 238, 240, or 242

36. An antibody conjugate comprising the fusion protein of any one of claims 27-35.

37. The antibody conjugate of claim 36, wherein the antibody conjugate comprises a single sialidase.

38. The antibody conjugate of claim 36, wherein the antibody conjugate comprises two sialidases.

39. The antibody conjugate of claim 37, wherein the two sialidases are identical.

40. The antibody conjugate of any one of claims 36-39, wherein the antibody conjugate comprises a single antigen-binding site.

41. The antibody conjugate of any one of claims 36-39, wherein the antibody conjugate comprises two antigen-binding sites.

42. The antibody conjugate of claim 41, wherein the two antigen-binding sites are identical.

43. The antibody conjugate of any one of claims 36-42, wherein the antibody conjugate has a molecular weight from about 135 kDa to about 165 kDa.

44. The antibody conjugate of any one of claims 36-42, wherein the antibody conjugate has a molecular weight from about 215 kDa to about 245 kDa.

45. The antibody conjugate of any one of claims 36-44, wherein the antibody conjugate comprises:
(a) a first polypeptide comprising an immunoglobulin light chain;
(b) a second polypeptide comprising an immunoglobulin heavy chain; and
(c) a third polypeptide comprising an immunoglobulin Fc domain and a sialidase;
wherein the first and second polypeptides are covalently linked together and the second and third polypeptides are linked together, and wherein the first polypeptide and the second polypeptide together define an antigen-binding site.

46. The antibody conjugate of claim 45, wherein the third polypeptide comprises the sialidase and the immunoglobulin Fc domain in an N- to C-terminal orientation.

47. The antibody conjugate of any one of claims 36-44, wherein the fusion protein comprises:
(a) a first polypeptide comprising a first immunoglobulin light chain;
(b) a second polypeptide comprising a first immunoglobulin heavy chain and a first sialidase;
(c) a third polypeptide comprising a second immunoglobulin heavy chain and a second sialidase; and
(d) a fourth polypeptide comprising a second immunoglobulin light chain;
wherein the first and second polypeptides are covalently linked together, the third and fourth polypeptides are covalently linked together, and the second and third polypeptides are covalently linked together, and wherein the first polypeptide and the second polypeptide together define a first antigen-binding site, and the third polypeptide and the fourth polypeptide together define a second antigen-binding site.

48. The antibody conjugate of claim 47, wherein the second and third polypeptides comprise the first and second immunoglobulin heavy chain and the first and second sialidase, respectively, in an N- to C-terminal orientation.

49. The antibody conjugate of any one of claims 36-44, wherein the antibody conjugate comprises:
(a) a first polypeptide comprising a first sialidase, a first immunoglobulin Fc domain, and a first single chain variable fragment (scFv); and
(b) a second polypeptide comprising a second sialidase, a second immunoglobulin Fc domain, and a second single chain variable fragment (scFv);
wherein the first and second polypeptides are covalently linked together, and wherein the first scFv defines a first antigen-binding site, and the second scFv defines a second antigen-binding site.

50. The antibody conjugate of claim 49, wherein the first polypeptide comprises the first sialidase, the first immunoglobulin Fc domain, and the first scFv in an N- to C-terminal orientation, and the second polypeptide comprises the second sialidase, the second immunoglobulin Fc domain, and the second scFv in an N- to C-terminal orientation.

51. The antibody conjugate of any one of claims 36-44, wherein the antibody conjugate comprises:
(a) a first polypeptide comprising an immunoglobulin light chain;
(b) a second polypeptide comprising an immunoglobulin heavy chain and a single chain variable fragment (scFv); and
(c) a third polypeptide comprising an immunoglobulin Fc domain and a sialidase;
wherein the first and second polypeptides are covalently linked together and the second and third polypeptides are covalently linked together, and wherein the immunoglobulin light chain and immunoglobulin heavy chain together define a first antigen-binding site and the scFv defines a second antigen-binding site.

52. The antibody conjugate of claim 51, wherein the second polypeptide comprises the immunoglobulin heavy chain and the scFv in an N- to C-terminal orientation, and the third polypeptide comprises the sialidase and the immunoglobulin Fc domain in an N- to C-terminal orientation.

53. An isolated nucleic acid comprising a nucleotide sequence encoding the recombinant enzyme of any one of claims 1-26, the fusion protein of any one of claims 27-35, or at least a portion of the antibody conjugate of any one of claims 36-52.

54. An expression vector comprising the nucleic acid of claim 53.

55. A host cell comprising the expression vector of claim 54.

56. A pharmaceutical composition comprising the recombinant enzyme of any one of claims 1-26, the fusion protein of any one of claims 27-35, or the antibody conjugate of any one of claims 36-52.

57. A method of treating cancer in a subject in need thereof, the method comprising administering to the subject an effective amount of the recombinant enzyme of any one of claims 1-26, the fusion protein of any one of claims 27-35, or at least a portion of the antibody conjugate of any one of claims 36-52, or the pharmaceutical composition of claim 56.

58. The method of claim 57, wherein the cancer is a solid tumor, soft tissue tumor, hematopoietic tumor or metastatic lesion.

59. The method of claim 58, wherein the solid tumor is a sarcoma, adenocarcinoma, or carcinoma.

60. The method of claim 58 or 59, wherein the solid tumor is a head and neck (e.g., pharynx), thyroid, lung (e.g., small cell or non-small cell lung carcinoma (NSCLC)), breast, lymphoid, gastrointestinal (e.g., oral, esophageal, stomach, liver, pancreas, small intestine, colon and rectum, anal canal), genital or genitourinary tract (e.g., renal, urothelial, bladder, ovarian, uterine, cervical, endometrial, prostate, testicular), CNS (e.g., neural or glial cell, e.g., neuroblastoma or glioma), or skin (e.g., melanoma) tumor.

61. The method of claim 58, wherein the hematopoietic tumor is a leukemia, acute leukemia, acute lymphoblastic leukemia (ALL), B-cell, T-cell or FAB ALL, acute myeloid leukemia (AML), chronic myelocytic leukemia (CIVIL), chronic lymphocytic leukemia (CLL), e.g., transformed CLL, diffuse large B-cell lymphoma (DLBCL), follicular lymphoma, hairy cell leukemia, myelodyplastic syndrome (MDS), lymphoma, Hodgkin's disease, malignant lymphoma, non-Hodgkin's lymphoma, Burkitt's lymphoma, multiple myeloma, or Richter's Syndrome (Richter's Transformation).
